(19) United States
(12) Patent Application Publication
(10) Pub. No.: US 2016/0024169 A1
(43) Pub. Date: Jan. 28, 2016

(54) INSULIN-INCRETIN CONJUGATES

(71) Applicant: INDIANA UNIVERSITY RESEARCH AND TECHNOLOGY CORPORATION, Indianapolis, IN (US)

(72) Inventors: RICHARD D. DIMARCHI, Carmel, IN (US); TODD PARODY, Bloomington, IN (US); JIE HAN, BEIJING (CN); PENGYUN LI, Bloomington, IN (US)

(21) Appl. No.: 14/774,357

(22) PCT Filed: Mar. 5, 2014
(86) PCT No.: PCT/US14/20801

§ 371 Date: Sep. 10, 2015

Related U.S. Application Data
(60) Provisional application No. 61/783,491, filed on Mar. 14, 2013.

(51) Int. Cl. C07K 14/62; C07K 14/605

(52) U.S. Cl. CPC C07K 14/62; C07K 14/605

(57) ABSTRACT

Disclosed herein are insulin agonist peptides conjugated to incretins wherein the insulin/incretin conjugate has agonist activity at both the insulin receptor and the corresponding incretin receptor. Insulin is a proven therapy for the treatment of juvenile-onset diabetes and later-stage adult-onset diabetes. The peptide is biosynthesized as a larger linear precursor of low potency (approximately 2% to 9% of native insulin), named proinsulin. Proinsulin is proteolytically converted to insulin by the selective removal of a 35-residue connecting peptide (C peptide).

### CROSS-REFERENCE TO RELATED APPLICATIONS

[0001] This application claims priority to U.S. Provisional Patent Application No. 61/783,491, filed Mar. 14, 2013, the contents of which are incorporated by reference in their entirety into the present application.

### INCORPORATION BY REFERENCE OF MATERIAL SUBMITTED ELECTRONICALLY

[0002] Incorporated by reference in its entirety is a computer-readable sequence listing submitted concurrently herewith and identified as follows: one 983 KB ASCII (text) file named “27137_PCT_SL.txt”, created on Mar. 5, 2014.

### BACKGROUND

[0003] Insulin is a proven therapy for the treatment of juvenile-onset diabetes and later stage adult-onset diabetes. The peptide is biosynthesized as a larger linear precursor of low potency (approximately 2% to 9% of native insulin), named proinsulin. Proinsulin is proteolytically converted to insulin by the selective removal of a 35-residue connecting peptide (C peptide). The resultant heteroduplex formed by disulfide links between the insulin “A chain” (SEQ ID NO: 1) and “B chain” (SEQ ID NO: 2) chain, representing a total of 51 amino acids, has high potency for the insulin receptor (nM range). Native insulin has approximately one hundredfold selective affinity for the insulin receptor relative to the related insulin-like growth factor 1 receptor, but demonstrates little selectively for the two different insulin receptor isoforms, named A & B.

[0004] The insulin-like growth factors 1 and 2 are single chain liner peptide hormones that are highly homologous in their A and B chain sequences, sharing approximately fifty percent homology with native insulin. The IGF A and B chains are linked by a “C-peptide”, wherein the C-peptides of the two IGFs differ in size and amino acid sequence, the first being twelve and the second being eight amino acids in length. Human IGF-1 is a 70 aa basic peptide having the protein sequence shown in SEQ ID NO: 3, and has a 43% homology with proinsulin (Rinderknecht et al. (1978) J. Biol. Chem. 253:2769-2776). Human IGF-2 is a 67 amino acid basic peptide having the protein sequence shown in SEQ ID NO: 4. The IGFs demonstrate considerably less activity at the insulin B receptor isoform than the A-receptor isoform.

[0005] Applicants have previously identified IGF-1 based insulin peptides analogs, (wherein the native Gln-Phe dipeptide of the B-chain is replaced by Tyr-Leu) that display high activity at the insulin receptor (see PCT/US2009/068713, the disclosure of which is incorporated herein). Such analogs (referred to herein as IGF YL analog peptides) are more readily synthesized than insulin and enable the development of co-agonist analogs for insulin and IGF-1 receptors, and selective insulin receptor specific analogs. Furthermore, these insulin analogs can also be formulated as single chain insulin agonists in accordance with the present disclosure.

[0006] Single chain insulin analogs comprising the insulin A and B chains have been previously prepared (see EP 1,193,272 and US 2007/0129284). However, single chain high potency insulin agonists can also be prepared by insertion of the IGF-1 C-peptide, or analogs thereof, as a connecting peptide linking the insulin B and A peptides. The selective mutation of individual amino acids in the C-peptide sequence yields peptides that are highly selective for insulin relative to IGF-1 receptor.

[0007] Incretins are a group of gastrointestinal hormones that that are involved in a wide variety of physiological functions, including glucose homeostasis, insulin secretion, gastric emptying, and intestinal growth, as well as the regulation of food intake. Pre-proglucagon is a 158 amino acid precursor polypeptide that is processed in different tissues to form a number of different peptides. Incretins include a number of proglucagon-derived peptides, including glucagon (SEQ ID NO: 701), glucagon-like peptide-1 (GLP-1; amino acids 7-36 are provided as SEQ ID NO: 703 and amino acids 7-35 as SEQ ID NO: 704), glucagon-like peptide-2 (GLP-2; SEQ ID NO: 708) and oxyntomodulin (OXM; SEQ ID NO: 706).

[0008] Glucagon is a 29-amino acid peptide that corresponds to amino acids 33 through 61 of pre-proglucagon, while GLP-1 is produced as a 37-amino acid peptide that corresponds to amino acids 72 through 108 of pre-proglucagon. GLP-1(7-36) amide (SEQ ID NO: 703; the C terminus is an arginine amide) or GLP-1(7-37) acid (SEQ ID NO: 704; C terminus is a glycine) are biologically potent forms of GLP-1, that demonstrate essentially equivalent activity at the GLP-1 receptor.

[0009] Glucagon is a life-saving medicine that is used in the acute treatment of severe hypoglycemia. Oxyntomodulin has been reported to have pharmacological ability to suppress appetite and lower body weight. Clinical studies with GLP-1 receptor agonists or stabilized GLP-1 analogs have proven this family of peptides to be an effective treatment for Type II diabetes.

[0010] In addition, gastric inhibitory polypeptide (GIP) is also known as a glucose-dependent insulinotropic peptide, and is a member of the secretin family of hormones. GIP is derived from a 153-amino acid proprotein encoded by the GIP gene and circulates as a biologically active 42-amino acid peptide (SEQ ID NO: 707). The GIP gene is expressed in the small intestine as well as the salivary glands and is a weak inhibitor of gastric acid secretion. In addition to its inhibitory effects in the stomach, in the presence of glucose, GIP enhances insulin release by pancreatic beta islet cells when administered in physiological doses. GIP is believed to function as an enteric factor that stimulates the release of pancreatic insulin and that may play a physiological role in maintaining glucose homeostasis.

[0011] As disclosed herein conjugates are formed between an insulin peptide and an incretin, including for example a glucagon related peptide, wherein the conjugate has agonist activity at both the insulin receptor and the corresponding incretin receptor. More particularly, the conjugation of a glucagon related peptide (e.g., GIP, GLP-1 or glucagon) is anticipated to produce a beneficial modification of the insulin peptide activity. For example, linking a peptide having agonist activity at the glucagon receptor to an insulin peptide is anticipated to enhance targeting of the conjugate to the liver since the glucagon receptor is predominately located in the liver. Targeting of the conjugate to the liver is desirable since the liver is primarily involved in glucose production not utilization. Thus targeting the liver may be a safer approach to shutting off glucose production than occurs when insulin contact other tissues such as muscle or fat, where in addition to turning off glucose production it also stimulates glucose use leading to a higher risk of hypoglycemia. Also, there are glucagon receptors present on the alpha cells of the pancreas. Delivering the complex to the alpha cells may suppress additional glucagon production or make the alpha cell more sensitive to hypoglycemia. Applicants also anticipate that the presence of glucagon in the glucagon-insulin conjugates may serve as a buffer on the activity of the coupled insulin to provide a more baseline activity and thus avoid spikes in blood glucose levels.

[0012] Similarly, it is anticipated that conjugates of insulin peptides with other glucagon related peptides including the incretins GLP-1 and GIP and other related peptides having activity at the GLP-1 and/or GIP receptors will produce conjugates having beneficial properties. For example, GLP-insulin conjugate may be targeted to the hypothalamus, to decrease appetite as well as reduce blood glucose. Alternatively or additionally, the GLP-insulin conjugate may be targeted to the beta cells to drive anabolic response (increase islet beta cells production of insulin).

[0013] The glucagon related peptide-insulin peptide conjugates are also suitable for further structural enhancements that are envisioned to yield improved therapeutic index, through the use of prodrug chemistry; extended duration of action, by linkage of plasma proteins such as albumin, or other modifications, including pegylation and acylation; and enhanced physical stability, by glycosylation. The preparation of single chain insulin analogs using a C-peptide linker also provides a novel structural location for where many of these chemical modifications can be successfully deployed. The primary use of the insulin conjugates would be in the treatment of insulin-dependent diabetes.

### SUMMARY

[0014] An insulin agonist/incretin conjugate is provided wherein the conjugate has agonist activity at both the insulin receptor and the corresponding incretin receptor. The insulin peptide component of the conjugate can be native insulin or any known insulin analog that has activity at the insulin receptor including for example any insulin peptide disclosed in published international applications WO96/34882, WO 2010/080607, WO 2010/080609, WO 2011/159882, WO/2011/159895 and U.S. Pat. No. 6,630,348, the disclosures of which are incorporated herein by reference. The incretin component of the conjugate can be any glucagon related peptide as disclosed herein including for example native glucagon, GLP-1, GIP or any known incretin or glucagon related peptide that has activity at one or more incretin receptors. Glucagon related peptides suitable for use in accordance with this disclosure include, for example, any glucagon related peptide disclosed in published international applications WO 2009/155258, WO 2009/058734, WO 2011/094337, WO 2009/148089, WO 2011/163473 and WO 2010/071807, the disclosures of which are expressly incorporated herein in their entirety.

[0015] In accordance with one embodiment the carboxy terminus of a glucagon related peptide is linked to the N-terminus of an insulin peptide either directly via a peptide bond (forming a fusion peptide), or indirectly through a spacer. In accordance with one embodiment conjugates formed by the fusions of glucagon or GLP-1 with insulin are provided that demonstrate high potency, balanced activity at the respective receptors of the conjugate, and glucose lowering capability when injected in normal mice. In one embodiment the C-terminal region of the glucagon related peptides is covalently linked to the insulin peptide through a position independently selected from the side chain of an amino acid at a position selected from the group consisting of A9, A14 and A15 of the A chain, positions B1, B2, B10, B22, B28 or B29 of the B chain, the N-terminal alpha amine of the B chain, the carboxy terminus of the A or B chain and at the side chain of an amino acid at any position of a linking moiety that links the A chain and B chain of a single chain insulin analog.

[0016] As used herein reference to the C-terminal region of the glucagon related peptide is intended to encompass the native C-terminus of a glucagon peptide or any amino acid added to the native C-terminus of a glucagon analog or to the C-terminal amino acid of a glucagon analog that has been shortened by the deletion amino acids at the C-terminus, respectively, relative to the native glucagon sequence. For example the C-terminus of the native glucagon related peptide can be extended by 1 to 3 amino acids which are then linked to the insulin peptide either through the side chain of an amino acid of the C-terminal region or through the C-terminal carboxy group. In one embodiment the carboxy terminal region of the glucagon related peptide is covalently linked to the amino terminal region of the B chain of the insulin peptide. In one embodiment the insulin peptide is a single chain insulin analog. In one embodiment the insulin peptide is a single chain insulin analog wherein the carboxy terminal region of the glucagon related peptide is covalently linked to the amino terminus of the B chain of the insulin peptide.

[0017] In one embodiment the insulin peptide of the conjugate is a two chain insulin analog comprising an A chain and B chain linked to one another via intermolecular disulfide bonds. In a further embodiment the conjugate comprises a two chain insulin analog wherein a first and second glucagon related peptide are covalently linked to the insulin peptide at a position selected from the group consisting of the amino terminus of the B chain, the carboxy terminal region of the A chain, and the carboxy terminal region of the B chain. In one embodiment the first and second glucagon related peptides have different affinities/selectivity for the glucagon, GLP-1 and GIP receptors.

[0018] In one embodiment the glucagon related peptide is selected from the group consisting of native glucagon, native GLP-1 and native GIP. In one embodiment the glucagon related peptide is a native glucagon or a glucagon analog having activity at one or more incretin receptors selected from the glucagon receptor, the GLP-1 receptor or the GIP receptor. In one embodiment the glucagon related peptide component of the conjugate comprises

[0019] (i) the amino acid sequence:
[0020] X1-X2-Gln-Gly-Thr-Phe-Thr-Ser-Asp-Tyr-Ser-Lys-Tyr-Leu-Asp-Ser-Arg-Arg-Ala-Gln-Asp-Phe-Val-Gln-Trp-Leu-Met-Z (SEQ ID NO: 839) with 1 to 3 amino acid modifications thereto, wherein
[0021] X1 and/or X2 is a non-native (relative to SEQ ID NO: 701) amino acid that reduces susceptibility of the glucagon related peptide to cleavage by dipeptidyl peptidase IV (DPP-IV),
[0022] Z is selected from the group consisting of —COOH, -Asn-COOH, Asn-Thr-COOH, and Y—COOH, wherein Y is 1 to 2 amino acids, and further wherein
[0023] (1) a lactam bridge connects the side chains of an amino acid at position i and an amino acid at position i+4, wherein i is 12, 16, 20 or 24 or
[0024] (2) one, two, three, or all of the amino acids at positions 16, 20, 21, and 24 of the glucagon related peptide is substituted with an α,α-disubstituted amino acid;

[0025] and said glucagon related peptide has glucagon agonist activity;

[0026] (ii) the amino acid sequence of SEQ ID NO: 701 modified to comprise at least one amino acid modification selected from the group consisting of:
[0027] substitution of Asn at position 28 with a charged amino acid;
[0028] substitution of Asn at position 28 with a charged amino acid selected from the group consisting of Lys, Arg, His, Asp, Glu, cysteic acid, and homocysteic acid;
[0029] substitution at position 28 with Asn, Asp, or Glu;
[0030] substitution at position 28 with Asp;
[0031] substitution at position 28 with Glu;
[0032] substitution of Thr at position 29 with a charged amino acid;
[0033] substitution of Thr at position 29 with a charged amino acid selected from the group consisting of Lys, Arg, His, Asp, Glu, cysteic acid, and homocysteic acid;
[0034] substitution at position 29 with Asp, Glu, or Lys;
[0035] substitution at position 29 with Glu;
[0036] insertion of 1-3 charged amino acids after position 29;
[0037] insertion after position 29 of Glu or Lys;
[0038] insertion after position 29 of Gly-Lys or Lys-Lys; or a combination thereof;
[0039] and at least one amino acid modification selected from Group A or Group B, or a combination thereof;

[0040] wherein Group A is an amino acid modification selected from the group consisting of substitution of Asp at position 15 with Glu, and substitution of Ser at position 16 with Thr or AIB; and

[0041] wherein Group B is an amino acid modification selected from the group consisting of:

[0042] substitution of His at position 1 with a non-native amino acid that reduces susceptibility of the glucagon related peptide to cleavage by dipeptidyl peptidase IV (DPP-IV),
[0043] substitution of Ser at position 2 with a non-native amino acid that reduces susceptibility of the glucagon related peptide to cleavage by dipeptidyl peptidase IV (DPP-IV),
[0044] substitution of Tyr at position 10 with Phe or Val;
[0045] substitution of Lys at position 12 with Arg;
[0046] substitution of Gln at position 20 with Ala or AIB;
[0047] substitution of Asp at position 21 with Glu;
[0048] substitution of Gln at position 24 with Ala or AIB;
[0049] substitution of Met at position 27 with Leu or Nle;
[0050] deletion of amino acids at positions 27-29;
[0051] deletion of amino acids at positions 28-29;
[0052] deletion of the amino acid at positions 29;
[0053] or a combination thereof;
[0054] and wherein said glucagon related peptide has glucagon agonist activity;
[0055] (iii) a glucagon related peptide of SEQ ID NO: 701, modified to comprise
   [0056] (a) an amino acid modification at position 1 that confers GIP agonist activity,
   [0057] (b) (1) a lactam bridge between the side chains of amino acids at positions i and i+4 or between the side chains of amino acids at positions j and j+3, wherein i is 12, 13, 16, 17, 20 or 24, and wherein j is 17, or
      [0058] (2) one, two, three, or all of the amino acids at positions 16, 20, 21, and 24 of the analog is substituted with an α,α-disubstituted amino acid,
   [0059] (c) amino acid modifications at one, two or all of positions 27, 28 and 29, and
   [0060] (d) 1-6 further amino acid modifications,

[0061] wherein the EC50 of the analog for GIP receptor activation is about 10 nM or less;

[0062] (iv) the sequence of X₁X₂X₃GTFTSDX₁₀SX₁₂YLX₁₅X₁₆X₁₇X₁₈AX₂₀X₂₁FX₂₃X₂₄WL X₂₇X₂₈X₂₉ (SEQ ID NO: 72) wherein

[0063] X₁ is selected from the group consisting of His, D-His, (Des-amino)His, hydroxyl-His, acetyl-His, homo-His or alpha, alpha-dimethyl imidiazole acetic acid (DMIA), N-methyl His, alpha-methyl His, and imidazole acetic acid;

[0064] X₂ is selected from the group consisting of Ser, D-Ser, Ala, D-Ala, Val, Gly, N-methyl Ser, aminoisobutyric acid (Aib) and N-methyl Ala;

[0065] X₃ is selected from the group consisting of Gln, Glu, Orn and Nle;

[0066] X₁₀ is selected from the group consisting of Tyr, Val and Trp;

[0067] X₁₂ is selected from the group consisting of Ser, Lys, Citrulline, Orn and Arg;

[0068] X₁₅ is selected from the group consisting of Asp, Glu, cysteic acid, homoglutamic acid and homocysteic acid;

[0069] X₁₆ is selected from the group consisting of Ser, Gly, Glu, Gln, homoglutamic acid and homocysteic acid;

[0070] X₁₇ is selected from the group consisting of Arg, Gln, Lys, Cys, Orn, homocysteine and acetyl phenylalanine;

[0071] X₁₈ is selected from the group consisting of Arg, Ala, Lys, Cys, Orn, homocysteine and acetyl phenylalanine;

[0072] X₂₀ is selected from the group consisting of Gln, Lys, Arg, Orn and Citrulline;

[0073] X₂₁ is selected from the group consisting of Gln, Glu, Asp, Lys, Cys, Orn, homocysteine and acetyl phenyalanine;

[0074] X₂₃ is selected from the group consisting of Val and Ile;

[0075] X₂₄ is selected from the group consisting of Ala, Gln, Glu, Lys, Cys, Orn, homocysteine and acetyl phenyalanine;

[0076] X₂₇ is selected from the group consisting of Met, Val, Leu and Nle;

[0077] X₂₈ is selected from the group consisting of Asn, Arg, Citrulline, Orn, Lys and Asp; and

[0078] X₂₉ is selected from the group consisting of Thr, Gly, Lys, Cys, Orn, homocysteine and acetyl phenyalanine; or an analog of SEQ ID NO: 72, wherein said analog differs from SEQ ID NO: 72 by 1 to 3 amino acid modifications, selected from positions 1, 2, 3, 5, 7, 10, 11, 13, 14, 17, 18, 19, 21, 24, 27, 28, and 29, wherein said glucagon related peptide exhibits at least 20% of the activity of native GLP-1 at the GLP-1 receptor;

[0079] (v) an amino acid that differs from SEQ ID NO: 701 by no more than ten amino acid modifications, comprising one or more amino acid substitutions with AIB at positions 16, 20, 21, and/or 24, and an amino acid modification at position 1 and/or 2 that provides reduced susceptibility to cleavage by dipeptidyl peptidase IV, wherein said glucagon related peptide exhibits at least 20% of the activity of native GLP-1 at the GLP-1 receptor.

[0080] In one embodiment the insulin peptide of the conjugate comprises an A chain and a B chain wherein said A chain comprises a sequence GIVX₄X₅CCX₈X₉X₁₀CX₁₂LX₁₄X₁₅LX₁₇X₁₅YCX₂₁-R₁₃ (SEQ ID NO: 19), and said B chain comprises a sequence R₂₂-X₂₅LCGX₂₉X₃₀LVX₃₃X₃₄LYLVCGX₄₁X₄₂GFX₄₅ (SEQ ID NO: 20), wherein

[0081] X₄ is glutamic acid or aspartic acid;

[0082] X₅ is glutamine or glutamic acid

[0083] X₈ is histidine, threonine or phenylalanine;

[0084] X₉ is serine, arginine, lysine, ornithine or alanine;

[0085] X₁₀ is isoleucine or serine;

[0086] X₁₂ is serine or aspartic acid;

[0087] X₁₄ is tyrosine, arginine, lysine, ornithine or alanine;

[0088] X₁₅ is glutamine, glutamic acid, arginine, alanine, lysine, ornithine or leucine;

[0089] X₁₇ is glutamic acid, aspartic acid, asparagine, lysine, ornithine or glutamine;

[0090] X₁₈ is methionine, asparagine, glutamine, aspartic acid, glutamic acid or threonine;

[0091] X₂₁ is selected from the group consisting of alanine, glycine, serine, valine, threonine, isoleucine, leucine, glutamine, glutamic acid, asparagine, aspartic acid, histidine, tryptophan, tyrosine, and methionine;

[0092] X₂₅ is histidine or threonine;

[0093] X₂₉ is selected from the group consisting of alanine, glycine and serine;

[0094] X₃₀ is selected from the group consisting of histidine, aspartic acid, glutamic acid, homocysteic acid and cysteic acid;

[0095] X₃₃ is selected from the group consisting of aspartic acid and glutamic acid;

[0096] X₃₄ is selected from the group consisting of alanine and threonine;

[0097] X₄₁ is selected from the group consisting of glutamic acid, aspartic acid or asparagine;

[0098] X₄₂ is selected from the group consisting of alanine, ornithine, lysine and arginine;

[0099] X₄₅ is tyrosine or phenylalanine;

[0100] R₂₂ is selected from the group consisting of AYRPSE (SEQ ID NO: 14), FVNQ (SEQ ID NO: 12), PGPE (SEQ ID NO: 11), a tripeptide glycine-proline-glutamic acid, a tripeptide valine-asparagine-glutamine, a dipeptide proline-glutamic acid, a dipeptide asparagine-glutamine, glutamine, glutamic acid and an N-terminal amine; and

[0101] R₁₃ is COOH or CONH₂. In one embodiment the conjugate comprises a sequence selected from the group consisting of SEQ ID NO: 132, SEQ ID NO: 135, SEQ ID NO: 139 and SEQ ID NO: 140 or an analog thereof that differs from SEQ ID NO: 132, SEQ ID NO: 135, SEQ ID NO: 139 or SEQ ID NO: 140 by 1, 2, 3, 4 or 5 amino acid modifications. In one embodiment the conjugate comprises a sequence that differs from SEQ ID NO: 132, SEQ ID NO: 135, SEQ ID NO: 139 or SEQ ID NO: 140 by 1, 2 or 3 amino acid substitutions.

[0102] In one embodiment the glucagon related peptide-insulin conjugate comprises a hydrophilic moiety linked to the N-terminal alpha amine of the B chain or to the side chain of an amino acid at a position selected from the group consisting of A9, A14 and A15 of the A chain or positions B1, B2, B10, B22, B28 or B29 of the B chain or to a side chain of an amino acid of the linking moiety in a single chain insulin analog. Alternatively, or in addition, a hydrophilic moiety can be linked to the glucagon related peptide at any of amino acid positions 19, 20, 23, 24, 27, 32, 43 or the C-terminal region.

[0103] In one embodiment the hydrophilic moiety is a polyethylene chain and in a further embodiment the polyethylene chain is covalently bound to the side chain of an amino acid of the linking moiety of the insulin peptide component, when the insulin peptide is a single chain insulin analog. In one embodiment the insulin peptide is a single chain insulin wherein linking moiety joining the B and A chains comprises an amino acid sequence of no more than 17 amino acids in length and comprising the sequence GYGSSSX₅₇X₅₈ (SEQ ID NO: 21), GAGSSSRR (SEQ ID NO: 22) or GYGSSSX₅₇X₅₈APQT; (SEQ ID NO: 69) wherein X₅₇ and X₅₈ are independently arginine, lysine or ornithine and the amino acid designated by X₅₇ or X₅₈ optionally further comprises a hydrophilic moiety linked to the side chain of the amino acid at that position. In one embodiment the hydrophilic moiety is a polyethylene glycol chain.

[0104] Acylation or alkylation can increase the half-life of the glucagon related peptide-insulin conjugate peptides in circulation. Acylation or alkylation can advantageously delay the onset of action and/or extend the duration of action at the insulin receptors. The glucagon related peptide-insulin conjugate peptides may be acylated or alkylated at the same amino acid position where a hydrophilic moiety is linked (including, for example at position 8 of the linking moiety), or at a different amino acid position.

[0105] Also encompassed by the present disclosure are pharmaceutical compositions comprising the glucagon related peptide-insulin conjugates and a pharmaceutically acceptable carrier. In accordance with one embodiment a pharmaceutical composition is provided comprising any of the glucagon related peptide-insulin conjugates disclosed herein preferably at a purity level of at least 90%, 91%, 92%, 93%, 94%, 95%, 96%, 97%, 98% or 99%, and a pharmaceutically acceptable diluent, carrier or excipient. Such compositions may contain a single chain insulin agonist peptide as disclosed herein at a concentration of at least 0.5 mg/ml, 1 mg/ml, 2 mg/ml, 3 mg/ml, 4 mg/ml, 5 mg/ml, 6 mg/ml, 7 mg/ml, 8 mg/ml, 9 mg/ml, 10 mg/ml, 11 mg/ml, 12 mg/ml, 13 mg/ml, 14 mg/ml, 15 mg/ml, 16 mg/ml, 17 mg/ml, 18 mg/ml, 19 mg/ml, 20 mg/ml, 21 mg/ml, 22 mg/ml, 23 mg/ml, 24 mg/ml, 25 mg/ml or higher. In one embodiment the pharmaceutical compositions comprise aqueous solutions that are sterilized and optionally stored within various package containers. In other embodiments the pharmaceutical compositions comprise a lyophilized powder. The pharmaceutical compositions can be further packaged as part of a kit that includes a disposable device for administering the composition to a patient. The containers or kits may be labeled for storage at ambient room temperature or at refrigerated temperature.

[0106] In accordance with one embodiment an improved method of regulating blood glucose levels in insulin dependent patients is provided. The method comprises the steps of administering to a patient a single chain insulin agonist peptide, or derivative thereof, in an amount therapeutically effective for the control of diabetes.

### BRIEF DESCRIPTION OF THE DRAWINGS

[0107] FIG. 1. is a schematic overview of the two step synthetic strategy for preparing human insulin. Details of the procedure are provided in Example 1.

[0108] FIG. 2 is a graph comparing insulin receptor specific binding of synthetic human insulin relative to purified native insulin. The synthetic insulin was produced by the approach detailed in FIG. 1 where the A⁷-B⁷ bond is the first disulfide formed. As indicated by the data presented in the graph, the two molecules have similar binding activities.

[0109] FIG. 3 is a graph comparing relative insulin receptor binding of native insulin and the A19 insulin analog (Insulin(p-NH₂—F)¹⁹). As indicated by the data presented in the graph, the two molecules have similar binding activities.

[0110] FIG. 4 is a graph comparing relative insulin receptor binding of native insulin and the IGF1(Y^{B16}L^{B17}) analog. As indicated by the data presented in the graph, the two molecules have similar binding activities.

[0111] FIG. 5 is an alignment of the human proinsulin (A chain, SEQ ID NO: 1; B chain, SEQ ID NO: 2 and the C chain, SEQ ID NO: 141) and insulin-like growth factors I and II (IGF I; SEQ ID NO: 3 and IGF II; SEQ ID NO: 4) amino acid sequences. The alignment demonstrates that these three peptides share a high level of sequence identity (* indicates a space with no corresponding amino acid and a dash (-) indicates the identical amino acid as present in insulin).

[0112] FIG. 6 presents the sequence of a set of GLP1 and glucagon fusion peptides formed with a single chain insulin analog. More particularly, the sequences are presented showing a GLP-1-insulin conjugate (GLP1-DP8; SEQ ID NO: 132) and a glucagon-insulin conjugate (Glu-DP8; SEQ ID NO: 135). Further modifications of these two sequences are provided, wherein 1) the tyrosine at position A19 is substituted with alanine to effectively eliminate insulin activity: GLP-Insulin A-chain Ala19 (GLP1-DP8A19; SEQ ID NO: 133) and glucagon-Insulin A-chain Ala19 (Glu-DP8A19; SEQ ID NO: 136)); 2) the phenylalanine at position 22 is substituted with alanine to effectively eliminate GLP-1 activity: GLP1 Ala22 (SEQ ID NO: 134)); 3) the glutamine at position 3 with glutamic acid to eliminate glucagon activity (Glucagon E3; SEQ ID NO: 137); and 4) substitution of the serine at position 16 with glutamic acid to add GLP-1 and glucagon activity (Glucagon E16 (SEQ ID NO: 138)).

[0113] FIG. 7 presents the EC₅₀ values of chromatographically isolated pool fractions of the synthesized GLP1-DP8 conjugate at the insulin and GLP1 receptors relative to native insulin, IGF-1 and native glucagon. The structure of the GLP1-DP8 conjugate is shown in FIG. 6. Pool 1 demonstrates almost identical activity as native insulin at the insulin receptor. All three pools demonstrated high activity at the GLP1 receptor. Accordingly, the conjugate of pool 1 demonstrates potency as high as native insulin and native GLP1 at their two respective receptors.

[0114] FIG. 8 presents the EC₅₀ values of chromatographically isolated pool fractions of the synthesized Glu-DP8 conjugate at the insulin, glucagon and GLP1 receptors relative to native insulin, IGF-1 and native glucagon. The structure of the Glu-DP8 conjugate is shown in FIG. 6. Pool 1 demonstrates similar activity as native insulin at the insulin receptor, with the presence of the glucagon sequence moderating the activity of the conjugate at the insulin receptor. Pools 1 and 3 demonstrated high activity at the glucagon receptor. All three pools demonstrate poor activity at the GLP-1 receptor. Accordingly, the conjugate of pool 1 demonstrates high potency at the insulin and glucagon, but retaining selectivity with regard to the GLP1 receptor.

[0115] FIGS. 9A-9C demonstrate the in vivo effect of native insulin and the Glu-DP8 and GLP1-DP8 conjugates on blood glucose levels. Mice were subcutaneously injected with either native insulin (FIG. 9A) at two doses (12 nmol/kg or 60 nmol/kg), or one of the conjugates, GLP1-DP8 (FIG. 9B) or Glu-DP8 (FIG. 9C) administered at three different concentrations (12 nmol/kg, 60 nmol/kg and 300 nmol/kg). The conjugates demonstrated a less steep drop in blood glucose and a longer half life than native insulin (greater duration of action). In addition GLP1-DP8 (FIG. 9B) is more active in glucose lowering than Glu-DP8 (FIG. 9C), this is believed to result from glucagon buffering against insulin activity.

[0116] FIG. 10 provides the in vitro activity of GLP1-DP8 and GLP1-DP8A19 (GLP1-DP8 wherein position 19 of the insulin A chain has been modified to alanine) at the insulin receptor. Substitution of alanine at the A19 position effectively eliminates insulin's activity at the insulin receptor. EC₅₀ values indicate that both insulin and GLP1-DP8 are potent insulin receptor agonists, whereas GLP-1 and GLP1-DP8A19 have poor activity at the insulin receptor.

[0117] FIG. 11 presents the in vitro insulin receptor activity (EC₅₀ values) of Glu-DP8 and Glu-DP8A19, a glucagon-insulin conjugate modified to eliminate glucagon activity (GluE3-DP8; wherein position 3 of the glucagon peptide has been modified to glutamic acid), and a modification that maintains activity at the glucagon receptor (GluE16-DP8; wherein position 16 has been modified to glutamic acid). The glutamic acid substitution at position 3 glucagon is known to effectively eliminate glucagon activity. Substitution of alanine at the A19 position of insulin is known to effectively eliminate insulin activity at the insulin receptor. EC₅₀ values indicate that both insulin and Glu-DP8 are potent insulin receptor agonists, whereas glucagon and Glu-DP8A19 have poor activity at the insulin receptor. GluE3-DP8 and GluE16-DP8 also showed high potency at the insulin receptor.

[0118] FIG. 12 presents the in vitro glucagon receptor activity (EC₅₀ values) of Glu-DP8, GluE3-DP8 and GluE16-DP8, Glu-DP8A19, and GLP-1-DP8. The glutamic acid substitution at position 3 of glucagon is known to effectively eliminate glucagon activity, and substitution of alanine at the A19 position of insulin is known to effectively eliminate insulin activity at the insulin receptor. The glutamic acid substitution at position 16 of glucagon produces a co-agonist of glucagon and GLP-1. The EC₅₀ values indicate that glucagon, Glu-DP8 and GluE16-DP8 are potent glucagon receptor agonists, whereas GLP-1 and GLP1-DP8, and GluE3-DP8 have poor activity at the glucagon receptor. Accordingly, the conjugates exhibit the expected activities.

[0119] FIG. 13 presents the in vitro GLP-1 receptor activity (EC₅₀ values) of GLP-1, GLP-1-DP8, GLP-1A22-DP8, GLP-1-DP8A19, Glu-DP8, and GluE16-DP8. GLP-1A22-DP8 represents a conjugate of insulin and GLP-1 wherein position 22 has been substituted with alanine, a modification known to effectively eliminate GLP-1 activity. EC₅₀ values indicate that GLP-1, GLP1-DP8 and GLP1-DP8A19 are potent GLP-1 receptor agonists, whereas GLP-1A22-DP8, Glu-DP8, and GluE16-DP8 have poor activity at the GLP-1 receptor. Accordingly, the conjugates exhibit the expected activities.

[0120] FIG. 14A-14B present the in vivo effect of the listed conjugates on blood glucose levels in C57BL/6 mice administered DP8 (FIG. 14A) or GLP1-DP8A19 (FIG. 14B) relative to native insulin. DP8 or GLP1-DP8A19 was administered at two concentrations (60 nmoles/kg or 300 nmoles/kg). DP8 successfully lowered blood glucose whereas GLP1-DP8A19 failed to significantly lower blood glucose levels.

[0121] FIG. 15A-15C present the in vivo effect of the listed conjugates on blood glucose levels in C57BL/6 mice administered Glu-DP8A19 (FIG. 15A) or GLP1A22-DP8 (FIG. 15B) or GluE3/DP8 (FIG. 15C), relative to native insulin. The Glu-DP8A19 conjugate lacks insulin activity, yet still induces blood glucose lowering in vivo resulting from glucagon stimulated insulin secretion. GLP1A22-DP8 has reduced glucagon activity as a result of the substitution at position 22, however the insulin component of the conjugate provides blood glucose reducing activity such that the conjugate has approximately one fifth the activity of insulin. GluE3/DP8 has reduced glucagon activity due to the substitution at position E3, however the conjugate has glucose lowering activity that is slightly blunted relative to native insulin.

### DETAILED DESCRIPTION

### Definitions

[0122] In describing and claiming the invention, the following terminology will be used in accordance with the definitions set forth below.

[0123] The term “about” as used herein means greater or lesser than the value or range of values stated by 10 percent, but is not intended to designate any value or range of values to only this broader definition. Each value or range of values preceded by the term “about” is also intended to encompass the embodiment of the stated absolute value or range of values.

[0124] As used herein the term “amino acid” encompasses any molecule containing both amino and carboxyl functional groups, wherein the amino and carboxylate groups are attached to the same carbon (the alpha carbon). The alpha carbon optionally may have one or two further organic substituents. For the purposes of the present disclosure designation of an amino acid without specifying its stereochemistry is intended to encompass either the L or D form of the amino acid, or a racemic mixture. However, in the instance where an amino acid is designated by its three letter code and includes a superscript number, the D form of the amino acid is specified by inclusion of a lower case d before the three letter code and superscript number (e.g., dLys⁻¹), wherein the designation lacking the lower case d (e.g., Lys⁻¹) is intended to specify the native L form of the amino acid. In this nomenclature, the inclusion of the superscript number designates the position of the amino acid in the insulin analog sequence, wherein amino acids that are located within the insulin analog sequence are designated by positive superscript numbers numbered consecutively from the N-terminus. Additional amino acids linked to the insulin analog peptide either at the N-terminus or through a side chain are numbered starting with 0 and increasing in negative integer value as they are further removed from the insulin analog sequence.

[0125] As used herein the term “hydroxyl acid” refers to amino acids that have been modified to replace the alpha carbon amino group with a hydroxyl group.

[0126] As used herein the term “non-coded amino acid” encompasses any amino acid that is not an L-isomer of any of the following 20 amino acids: Ala, Cys, Asp, Glu, Phe, Gly, His, Ile, Lys, Leu, Met, Asn, Pro, Gln, Arg, Ser, Thr, Val, Trp, Tyr.

[0127] A “bioactive polypeptide” refers to polypeptides which are capable of exerting a biological effect in vitro and/or in vivo.

[0128] As used herein a general reference to a peptide is intended to encompass peptides that have modified amino and carboxy termini. For example, an amino acid sequence designating the standard amino acids is intended to encompass standard amino acids at the N- and C-terminus as well as a corresponding hydroxyl acid at the N-terminus and/or a corresponding C-terminal amino acid modified to comprise an amide group in place of the terminal carboxylic acid.

[0129] As used herein an “acylated” amino acid is an amino acid comprising an acyl group which is non-native to a naturally-occurring amino acid, regardless by the means by which it is produced. Exemplary methods of producing acylated amino acids and acylated peptides are known in the art and include acylating an amino acid before inclusion in the peptide or peptide synthesis followed by chemical acylation of the peptide. In some embodiments, the acyl group causes the peptide to have one or more of (i) a prolonged half-life in circulation, (ii) a delayed onset of action, (iii) an extended duration of action, (iv) an improved resistance to proteases, such as DPP-IV, and (v) increased potency at the IGF and/or insulin peptide receptors.

[0130] As used herein, an “alkylated” amino acid is an amino acid comprising an alkyl group which is non-native to a naturally-occurring amino acid, regardless of the means by which it is produced. Exemplary methods of producing alkylated amino acids and alkylated peptides are known in the art and including alkylating an amino acid before inclusion in the peptide or peptide synthesis followed by chemical alkylation of the peptide. Without being held to any particular theory, it is believed that alkylation of peptides will achieve similar, if not the same, effects as acylation of the peptides, e.g., a prolonged half-life in circulation, a delayed onset of action, an extended duration of action, an improved resistance to proteases, such as DPP-IV, and increased potency at the IGF and/or insulin receptors.

[0131] As used herein, the term “pharmaceutically acceptable carrier” includes any of the standard pharmaceutical carriers, such as a phosphate buffered saline solution, water, emulsions such as an oil/water or water/oil emulsion, and various types of wetting agents. The term also encompasses any of the agents approved by a regulatory agency of the US Federal government or listed in the US Pharmacopeia for use in animals, including humans.

[0132] As used herein the term “pharmaceutically acceptable salt” refers to salts of compounds that retain the biological activity of the parent compound, and which are not biologically or otherwise undesirable. Many of the compounds disclosed herein are capable of forming acid and/or base salts by virtue of the presence of amino and/or carboxyl groups or groups similar thereto.

[0133] Pharmaceutically acceptable base addition salts can be prepared from inorganic and organic bases. Salts derived from inorganic bases, include by way of example only, sodium, potassium, lithium, ammonium, calcium and magnesium salts. Salts derived from organic bases include, but are not limited to, salts of primary, secondary and tertiary amines.

[0134] Pharmaceutically acceptable acid addition salts may be prepared from inorganic and organic acids. Salts derived from inorganic acids include hydrochloric acid, hydrobromic acid, sulfuric acid, nitric acid, phosphoric acid, and the like. Salts derived from organic acids include acetic acid, propionic acid, glycolic acid, pyruvic acid, oxalic acid, malic acid, malonic acid, succinic acid, maleic acid, fumaric acid, tartaric acid, citric acid, benzoic acid, cinnamic acid, mandelic acid, methanesulfonic acid, ethanesulfonic acid, p-toluene-sulfonic acid, salicylic acid, and the like.

[0135] As used herein, the term “hydrophilic moiety” refers to any compound that is readily water-soluble or readily absorbs water, and which are tolerated in vivo by mammalian species without toxic effects (i.e. are biocompatible). Examples of hydrophilic moieties include polyethylene glycol (PEG), polylactic acid, polyglycolic acid, a polylactic-polyglycolic acid copolymer, polyvinyl alcohol, polyvinylpyrrolidone, polymethoxazoline, polyethyloxazoline, polyhydroxyethyl methacrylate, polyhydroxypropyl methacrylamide, polymethacrylamide, polydimethylacrylamide, and derivatised celluloses such as hydroxymethylcellulose or hydroxyethylcellulose and co-polymers thereof, as well as natural polymers including, for example, albumin, heparin and dextran.

[0136] As used herein, the term “treating” includes prophylaxis of the specific disorder or condition, or alleviation of the symptoms associated with a specific disorder or condition and/or preventing or eliminating said symptoms. For example, as used herein the term “treating diabetes” will refer in general to maintaining glucose blood levels near normal levels and may include increasing or decreasing blood glucose levels depending on a given situation.

[0137] As used herein an “effective” amount or a “therapeutically effective amount” of an insulin analog refers to a nontoxic but sufficient amount of an insulin analog to provide the desired effect. For example one desired effect would be the prevention or treatment of hyperglycemia. The amount that is “effective” will vary from subject to subject, depending on the age and general condition of the individual, mode of administration, and the like. Thus, it is not always possible to specify an exact “effective amount.” However, an appropriate “effective” amount in any individual case may be determined by one of ordinary skill in the art using routine experimentation.

[0138] The term, “parenteral” means not through the alimentary canal but by some other route such as intranasal, inhalation, subcutaneous, intramuscular, intraspinal, or intravenous.

[0139] Throughout the application, all references to a particular amino acid position by letter and number (e.g. position A5) refer to the amino acid at that position of either the A chain (e.g. position A5) or the B chain (e.g. position B5) in the respective native human insulin A chain (SEQ ID NO: 1) or B chain (SEQ ID NO: 2), or the corresponding amino acid position in any analogs thereof. For example, a reference herein to “position B28” absent any further elaboration would mean the corresponding position B27 of the B chain of an insulin analog in which the first amino acid of SEQ ID NO: 2 has been deleted. Similarly, amino acids added to the N-terminus of the native B chain are numbered starting with B0, followed by numbers of increasing negative value (e.g., B-1, B-2 . . . ) as amino acids are added to the N-terminus. Alternatively, any reference to an amino acid position in the linking moiety of a single chain analog, is made in reference to the native C chain of IGF 1 (SEQ ID NO: 17). For example, position 9 of the native C chain (or the “position C9”) has an alanine residue.

[0140] As used herein the term “native insulin peptide” is intended to designate the 51 amino acid heteroduplex comprising the A chain of SEQ ID NO: 1 and the B chain of SEQ ID NO: 2, as well as single-chain insulin analogs that comprise SEQ ID NOS: 1 and 2. The term “insulin peptide” as used herein, absent further descriptive language is intended to encompass the 51 amino acid heteroduplex comprising the A chain of SEQ ID NO: 1 and the B chain of SEQ ID NO: 2, as well as single-chain insulin analogs thereof (including for example those disclosed in published international application WO96/34882 and U.S. Pat. No. 6,630,348, the disclosures of which are incorporated herein by reference), including heteroduplexes and single-chain analogs that comprise modified analogs of the native A chain and/or B chain and derivatives thereof. Such modified analogs include modification of the amino acid at position A19, B16 or B25 to a 4-amino phenylalanine or one or more amino acid substitutions at positions selected from A5, A8, A9, A10, A12, A14, A15, A17, A18, A21, B1, B2, B3, B4, B5, B9, B10, B13, B14, B17, B20, B21, B22, B23, B26, B27, B28, B29 and B30 or deletions of any or all of positions B1-4 and B26-30. Insulin peptides as defined herein can also be analogs derived from a naturally occurring insulin by insertion or substitution of a non-peptide moiety, e.g. a retroinverso fragment, or incorporation of non-peptide bonds such as an azapeptide bond (CO substituted by NH) or pseudo-peptide bond (e.g. NH substituted with CH₂) or an ester bond (e.g., a depsipeptide, wherein one or more of the amide (—CONHR—) bonds are replaced by ester (COOR) bonds).

[0141] An “A19 insulin analog” is an insulin peptide that has a substitution of 4-amino phenylalanine or 4-methoxy phenylalanine for the native tyrosine residue at position 19 of the A chain of native insulin.

[0142] As used herein an “IGF^{B161317} analog peptide” is a generic term that comprising an A chain and B chain heteroduplex, as well as single-chain insulin analogs thereof, wherein the A chain comprises the peptide sequence of SEQ ID NO: 19 and the B chain comprises the sequence of SEQ ID NO: 20 as well as analogs of those sequences wherein the analog of the A chain and/or B chain comprise 1-3 further amino acid substitutions, with the proviso that the B chain does not comprise the sequence of SEQ ID NO: 2 and comprises a tyrosine at position B16 and a leucine at position B17.

[0143] An “IGF YL analog” is a peptide comprising an IGF A chain of SEQ ID NO: 19 and an IGF B chain of SEQ ID NO: 36.

[0144] As used herein, the term “single-chain insulin analog” encompasses a group of structurally-related proteins wherein insulin or IGF A and B chains, or analogs or derivatives thereof, are covalently linked to one another to form a linear polypeptide chain. As disclosed herein the single-chain insulin analog comprises the covalent linkage of the carboxy terminus of the B chain to the amino terminus of the A chain via a linking moiety.

[0145] As used herein the term “insulin A chain”, absent further descriptive language is intended to encompass the 21 amino acid sequence of SEQ ID NO: 1 as well as functional analogs and derivatives thereof, including the A chain of A19 insulin analogs and other analogs known to those skilled in the art, including modification of the sequence of SEQ ID NO: 1 by one or more amino acid insertions, deletions or substitutions at positions selected from A4, A5, A8, A9, A10, A12, A14, A15, A17, A18, A21.

[0146] As used herein the term “insulin B chain”, absent further descriptive language is intended to encompass the 30 amino acid sequence of SEQ ID NO: 2, as well as modified functional analogs of the native B chain, including modification of the amino acid at position B16 or B25 to a 4-amino phenylalanine or one or more amino acid insertions, deletions or substitutions at positions selected from B1, B2, B3, B4, B5, B9, B10, B13, B14, B17, B20, B21, B22, B23, B25, B26, B27, B28, B29 and B30 or deletions of any or all of positions B1-4 and B26-30.

[0147] The term “identity” as used herein relates to the similarity between two or more sequences. Identity is measured by dividing the number of identical residues by the total number of residues and multiplying the product by 100 to achieve a percentage. Thus, two copies of exactly the same sequence have 100% identity, whereas two sequences that have amino acid deletions, additions, or substitutions relative to one another have a lower degree of identity. Those skilled in the art will recognize that several computer programs, such as those that employ algorithms such as BLAST (Basic Local Alignment Search Tool, Altschul et al. (1993) J. Mol. Biol. 215:403-410) are available for determining sequence identity.

[0148] The term “glucagon related peptide” refers to those peptides which have biological activity (as agonists or antagonists) at any one or more of the glucagon, GLP-1, GLP-2, and GIP receptors and comprise an amino acid sequence that shares at least 40% sequence identity (e.g., 45%, 50%, 55%, 60%, 65%, 70%, 75%, 80%, 85%, 90%, 95%) with at least one of native glucagon, native oxyntomodulin, native exendin-4, native GLP-1, native GLP-2, or native GIP. Unless otherwise stated, any reference to an amino acid position in a glucagon related peptide (e.g. for linkage of a prodrug moiety, a conjugate moiety, a hydrophilic polymer, acylation or alkylation) refers to the position relative to the native glucagon amino acid sequence (SEQ ID NO: 701).

[0149] As used herein reference to the C-terminal region of a glucagon related peptide is intended to encompass the native C-terminus of a glucagon peptide or any amino acid of a C-terminal extension of a glucagon analog that has been extended by the addition of one or more amino acids at the C-terminus, or the terminal amino acid of a glucagon analog that has been shortened by the deletion of one or more amino acids, respectively, relative to the native glucagon sequence. An insulin peptide conjugated at the C-terminal region of a glucagon related peptide is intended to include linkage to the side chain of an amino acid of the C-terminal region or linkage through the C-terminal carboxylic acid moiety.

[0150] The term “GLP-1 agonist” refers to a compound that stimulates GLP-1 receptor activity, as measured by cAMP production using a validated in vitro model assay, such as that described in Example 13 of published International Application No. WO 2007/056362, published on May 18, 2007, the disclosure of which is hereby expressly incorporated by reference into the present application.

[0151] As used herein the term “native glucagon” refers to a peptide consisting of the sequence of SEQ ID NO: 701, the term “native GIP” refers to a peptide consisting of the sequence of SEQ ID NO: 707, and the term “native GLP-1” is a generic term that designates GLP-1(7-36) amide (consisting of the sequence of SEQ ID NO: 703), GLP-1(7-37) acid (consisting of the sequence of SEQ ID NO: 704) or a mixture of those two compounds. As used herein, a general reference to “glucagon” or “GIP” or “GLP-1” in the absence of any further designation is intended to mean native glucagon or native GIP or native GLP-1, respectively.

[0152] As used herein the term “glucagon peptide” is a generic term that designates the natural glucagon peptide of SEQ ID NO: 701 as well as modified derivatives having one or more amino acid modifications relative to the native glucagon sequence, optionally including but not limited to substitutions at amino acid positions 1, 2, 5, 7, 8, 10, 12, 13, 14, 16, 17, 18, 24, 28 and 29. Generally, all references to a particular amino acid position by number (e.g. position 28) refer to the amino acid at that position in native glucagon (SEQ ID NO: 701) or the corresponding amino acid position in any analogs thereof. For example, a reference to “position 28” would mean the corresponding position 27 for a glucagon analog in which the first amino acid of SEQ ID NO: 701 has been deleted. Similarly, a reference to “position 28” would mean the corresponding position 29 for a glucagon analog in which one amino acid has been added before the N-terminus of SEQ ID NO: 701.

[0153] As used herein the term “GLP-1 peptide” is a generic term that designates native GLP-1 as well as modified derivatives having one or more amino acid modifications relative to the native GLP-1 sequence.

[0154] As used herein the term “derivative” is intended to encompass chemical modification to a compound (e.g., an amino acid), including chemical modification in vitro, e.g. by introducing a group in a side chain in one or more positions of a polypeptide, e.g. a nitro group in a tyrosine residue, or iodine in a tyrosine residue, or by conversion of a free carboxylic group to an ester group or to an amide group, or by converting an amino group to an amide by acylation, or by acylating a hydroxy group rendering an ester, or by alkylation of a primary amine rendering a secondary amine or linkage of a hydrophilic moiety to an amino acid side chain. Other derivatives are obtained by oxidation or reduction of the side-chains of the amino acid residues in the polypeptide.

[0155] As used herein the term IGF A chain, absent further descriptive language is intended to encompass the 21 amino acid sequence of native IGF 1 or IGF 2 (SEQ ID NOs: 5 and 7 respectively), as well as functional analogs thereof known to those skilled in the art, including modification of the sequence of SEQ ID NO: 5 and 7 by one or more amino acid substitutions at positions selected from A5, A8, A9, A10, A12, A14, A15, A17, A18, A21.

[0156] As used herein the term “IGF YL B chain”, absent further descriptive language is intended to encompass an amino acid sequence comprising SEQ ID NO: 20, as well as analogs of the IGF YL B chain and derivatives thereof, including modification of the amino acid at position B16 or B25 to a 4-amino phenylalanine or one or more amino acid substitutions at positions selected from B1, B2, B3, B4, B5, B9, B10, B13, B14, B17, B20, B21, B22, B23, B26, B27, B28, B29 and B30 or deletions of any or all of positions B1-4 and B26-30.

[0157] As used herein, the term “selectivity” of a molecule for a first receptor relative to a second receptor refers to the following ratio: EC₅₀ of the molecule at the second receptor divided by the EC₅₀ of the molecule at the first receptor. For example, a molecule that has an EC₅₀ of 1 nM at a first receptor and an EC₅₀ of 100 nM at a second receptor has 100-fold selectivity for the first receptor relative to the second receptor.

[0158] As used herein an amino acid “modification” refers to a substitution of an amino acid, or the derivation of an amino acid by the addition and/or removal of chemical groups to/from the amino acid, and includes substitution with any of the 20 amino acids commonly found in human proteins, as well as atypical or non-naturally occurring amino acids. Commercial sources of atypical amino acids include Sigma-Aldrich (Milwaukee, Wis.), ChemPep Inc. (Miami, Fla.), and Genzyme Pharmaceuticals (Cambridge, Mass.). Atypical amino acids may be purchased from commercial suppliers, synthesized de novo, or chemically modified or derivatized from naturally occurring amino acids.

[0159] As used herein an amino acid “substitution” refers to the replacement of one amino acid residue by a different amino acid residue.

[0160] As used herein, the term “conservative amino acid substitution” is defined herein as exchanges within one of the following five groups:

[0161] I. Small aliphatic, nonpolar or slightly polar residues:
[0162] Ala, Ser, Thr, Pro, Gly;

[0163] II. Polar, negatively charged residues and their amides:
[0164] Asp, Asn, Glu, Gln, cysteic acid and homocysteic acid;

[0165] III. Polar, positively charged residues:
[0166] His, Arg, Lys; Ornithine (Orn)

[0167] IV. Large, aliphatic, nonpolar residues:
[0168] Met, Leu, Ile, Val, Cys, Norleucine (Nle), homocysteine

[0169] V. Large, aromatic residues:
[0170] Phe, Tyr, Trp, acetyl phenylalanine

[0171] As used herein the general term “polyethylene glycol chain” or “PEG chain”, refers to mixtures of condensation polymers of ethylene oxide and water, in a branched or straight chain, represented by the general formula H(OCH₂CH₂)ₙOH, wherein n is at least 2. “Polyethylene glycol chain” or “PEG chain” is used in combination with a numeric suffix to indicate the approximate average molecular weight thereof. For example, PEG-5,000 refers to polyethylene glycol chain having a total molecular weight average of about 5,000 Daltons.

[0172] As used herein the term “pegylated” and like terms refers to a compound that has been modified from its native state by linking a polyethylene glycol chain to the compound. A “pegylated polypeptide” is a polypeptide that has a PEG chain covalently bound to the polypeptide.

[0173] As used herein a “linker” is a bond, molecule or group of molecules that binds two separate entities to one another. Linkers may provide for optimal spacing of the two entities or may further supply a labile linkage that allows the two entities to be separated from each other. Labile linkages include photocleavable groups, acid-labile moieties, base-labile moieties and enzyme-cleavable groups.

[0174] As used herein a “dimer” is a complex comprising two subunits covalently bound to one another via a linker. The term dimer, when used absent any qualifying language, encompasses both homodimers and heterodimers. A homodimer comprises two identical subunits, whereas a heterodimer comprises two subunits that differ, although the two subunits are substantially similar to one another.

[0175] The term “C₁-Cₙ alkyl” wherein n can be from 1 through 6, as used herein, represents a branched or linear alkyl group having from one to the specified number of carbon atoms. Typical C₁-C₆ alkyl groups include, but are not limited to, methyl, ethyl, n-propyl, iso-propyl, butyl, iso-Butyl, sec-butyl, tert-butyl, pentyl, hexyl and the like.

[0176] The terms “C₂-Cₙ alkenyl” wherein n can be from 2 through 6, as used herein, represents an olefinically unsaturated branched or linear group having from 2 to the specified number of carbon atoms and at least one double bond. Examples of such groups include, but are not limited to, 1-propenyl, 2-propenyl (—CH₂—CH═CH₂), 1,3-butadienyl, (—CH═CHCH═CH₂), 1-butenyl (—CH═CHCH₂CH₃), hexenyl, pentenyl, and the like.

[0177] The term “C₂-Cₙ alkynyl” wherein n can be from 2 to 6, refers to an unsaturated branched or linear group having from 2 to n carbon atoms and at least one triple bond. Examples of such groups include, but are not limited to, 1-propynyl, 2-propynyl, 1-butynyl, 2-butynyl, 1-pentynyl, and the like.

[0178] As used herein the term “aryl” refers to a mono- or bicyclic carbocyclic ring system having one or two aromatic rings including, but not limited to, phenyl, naphthyl, tetrahydronaphthyl, indanyl, indenyl, and the like. The size of the aryl ring and the presence of substituents or linking groups are indicated by designating the number of carbons present. For example, the term “(C₁-C₃ alkyl)(C₆-C₁₀ aryl)” refers to a 5 to 10 membered aryl that is attached to a parent moiety via a one to three membered alkyl chain.

[0179] The term “heteroaryl” as used herein refers to a mono- or bi-cyclic ring system containing one or two aromatic rings and containing at least one nitrogen, oxygen, or sulfur atom in an aromatic ring. The size of the heteroaryl ring and the presence of substituents or linking groups are indicated by designating the number of carbons present. For example, the term “(C₁-Cₙ alkyl)(C₅-C₆heteroaryl)” refers to a 5 or 6 membered heteroaryl that is attached to a parent moiety via a one to “n” membered alkyl chain.

[0180] As used herein, the term “halo” refers to one or more members of the group consisting of fluorine, chlorine, bromine, and iodine.

[0181] As used herein the term “patient” without further designation is intended to encompass any warm blooded vertebrate domesticated animal (including for example, but not limited to livestock, horses, cats, dogs and other pets) and humans.

[0182] The term “isolated” as used herein means having been removed from its natural environment. In some embodiments, the analog is made through recombinant methods and the analog is isolated from the host cell.

[0183] The term “purified,” as used herein relates to the isolation of a molecule or compound in a form that is substantially free of contaminants normally associated with the molecule or compound in a native or natural environment and means having been increased in purity as a result of being separated from other components of the original composition. The term “purified polypeptide” is used herein to describe a polypeptide which has been separated from other compounds including, but not limited to nucleic acid molecules, lipids and carbohydrates.

[0184] A “peptidomimetic” refers to a chemical compound having a structure that is different from the general structure of an existing peptide, but that functions in a manner similar to the existing peptide, e.g., by mimicking the biological activity of that peptide. Peptidomimetics typically comprise naturally-occurring amino acids and/or unnatural amino acids, but can also comprise modifications to the peptide backbone. For example a peptidomimetic may include a sequence of naturally-occurring amino acids with the insertion or substitution of a non-peptide moiety, e.g. a retroinverso fragment, or incorporation of non-peptide bonds such as an azapeptide bond (CO substituted by NH) or pseudo-peptide bond (e.g. NH substituted with CH2), or an ester bond (e.g., depsipeptides, wherein one or more of the amide (—CONHR—) bonds are replaced by ester (COOR) bonds). Alternatively the peptidomimetic may be devoid of any naturally-occurring amino acids.

[0185] As used herein the term “charged amino acid” or “charged residue” refers to an amino acid that comprises a side chain that is negatively charged (i.e., de-protonated) or positively charged (i.e., protonated) in aqueous solution at physiological pH. For example, negatively charged amino acids include aspartic acid, glutamic acid, cysteic acid, homocysteic acid, and homoglutamic acid, whereas positively charged amino acids include arginine, lysine and histidine. Charged amino acids include the charged amino acids among the 20 amino acids commonly found in human proteins, as well as atypical or non-naturally occurring amino acids.

[0186] As used herein the term “acidic amino acid” refers to an amino acid that comprises a second acidic moiety (other than the alpha carboxylic acid of the amino acid), including for example, a side chain carboxylic acid or sulfonic acid group.

[0187] As used herein the term “patient” without further designation is intended to encompass any warm blooded vertebrate domesticated animal (including for example, but not limited to livestock, horses, cats, dogs and other pets), mammals, and humans.

### Abbreviations

[0188] Insulin analogs will be abbreviated as follows:

[0189] The insulin A and B chains will be designated by a capital A for the A chain and a capital B for the B chain wherein a superscript 0 (e.g., A⁰ or B⁰) will designate the base sequence is an insulin sequence (A chain: SEQ ID NO: 1, B chain SEQ ID NO: 2) and a superscript 1 (e.g., A¹ or B¹) will designate the base sequence is an IGF-1 sequence (A chain: SEQ ID NO: 5, B chain SEQ ID NO: 6). Modifications that deviate from the native insulin and IGF sequence are indicated in parenthesis following the designation of the A or B chain (e.g., [B¹(H5,H10,Y16,L17): A¹(H8,N18,N21)]) with the single letter amino acid abbreviation indicating the substitution and the number indicating the position of the substitution in the respective A or B chain, using native insulin numbering. A colon between the A and B chain indicates a two chain insulin whereas a dash will indicate a covalent bond and thus a single chain analog. In single chain analogs a linking moiety will be included between the A and B chains and the designation C¹ refers to the native IGF 1 C peptide, SEQ ID NO: 17. The designation “position C8” in reference to the linking moiety designates an amino acid located at the position corresponding to the eighth amino acid of SEQ ID NO: 17.

### EMBODIMENTS

[0190] Disclosed herein are conjugates of an insulin peptide and a glucagon related peptide. In one embodiment the conjugate comprises a covalent linkage of the insulin peptide and the glucagon related peptide either directly or through a linker. In one embodiment the glucagon related peptide is covalently linked to the amino or carboxy terminus of the insulin A chain or B chain. In another embodiment the C-terminal region of one or two glucagon related peptides are covalently linked to the insulin peptide through a position independently selected from the side chain of an amino acid at a position selected from the group consisting of A9, A14 and A15 of the A chain, positions B1, B2, B10, B22, B28 or B29 of the B chain, at the N-terminal alpha amine of the A or B chain, the carboxy terminus of the B chain or at the side chain of an amino acid at any position of a linking moiety that links the A chain and B chain in a single chain insulin analog, including for example at position C8. In another embodiment the N-terminus or C-terminus of an insulin peptide is covalently linked to the side chain of an amino acid of the glucagon related peptide at a position selected from 10, 20, 24, 28 and 29.

[0191] In another embodiment one or two glucagon related peptides are covalently linked to the insulin peptide through a position independently selected from the N-terminal alpha amine of the B chain, the carboxy terminus of the B chain or at any position of the linking moiety that links the A chain and B chain of a single chain insulin analog, including for example at position C8. In one embodiment the carboxy terminal region of the glucagon related peptide is covalently linked to the N-terminal alpha amine of the B chain of a single chain insulin peptide analog. In one embodiment the carboxy terminus of the glucagon related peptide is covalently linked to the N-terminal alpha amine of the B chain of a two chain or single chain insulin peptide analog.

[0192] In accordance with one embodiment the insulin peptide is a two chain insulin, wherein the A chain and B chain are linked to one another via interchain disulfide bonds. In one embodiment the conjugate comprises a two chain insulin peptide wherein the carboxy terminal region of the glucagon related peptide is covalently linked to the amino terminus of the A chain of the insulin peptide. In one embodiment the conjugate comprises a two chain insulin peptide wherein the carboxy terminus of the A chain or the B chain of the insulin peptide is covalently linked to the amino terminus of the glucagon related peptide. In one embodiment the conjugate comprises a two chain insulin peptide wherein the carboxy terminus of the glucagon related peptide is covalently linked to the amino terminus of the B chain of the insulin peptide. In one embodiment the conjugate comprises a two chain insulin peptide wherein the carboxy terminus of the B chain of the insulin peptide is covalently linked to the amino terminus of the glucagon related peptide.

[0193] In another embodiment the conjugate comprises a two chain insulin analog and a first and second glucagon related peptide wherein each glucagon related peptide is independently covalently linked to the insulin peptide at a position selected from the group consisting of the amino terminus of the B chain, the carboxy terminus of the A chain, and the carboxy terminus of the B chain. In one embodiment the conjugate comprises a two chain insulin peptide wherein the carboxy terminal region of a first glucagon related peptide is covalently linked to the amino terminus of the B chain of the insulin peptide and the carboxy terminus of the B chain of the insulin peptide is covalently linked to the amino terminus of a second glucagon related peptide. In one embodiment the first and second glucagon related peptides are different and have activity at two different receptors selected from the group consisting of the glucagon, GLP-1 and GIP receptors. In one embodiment the first glucagon related peptide has activity at the glucagon receptor and the second glucagon related peptide has activity at the GLP-1 receptor. In one embodiment the first and/or second glucagon related peptide is a coagonist having activity at two receptors selected from the group consisting of the glucagon, GLP-1 and GIP receptors.

[0194] In one embodiment the conjugate represents a fusion protein wherein the carboxy terminal region of the glucagon related peptide is linked to the amino terminus of the insulin peptide B chain either directly or through a peptide linker. In one embodiment the conjugate comprises a single chain insulin analog wherein the carboxy terminal region of the glucagon related peptide is covalently linked to the amino terminus of the single chain insulin analog. In one embodiment the conjugate comprises a single chain insulin analog wherein the carboxy terminus of the single chain insulin peptide is covalently linked to the amino terminus of the glucagon related peptide.

[0195] In some or any embodiments, the insulin peptide of the presently disclosed conjugate is native insulin, comprising the A chain of SEQ ID NO: 1 and the B chain of SEQ ID NO: 2, or an analog of native insulin, including for example a single-chain insulin analog comprising SEQ ID NOS: 1 and 2. In one embodiment the insulin peptide is an IGF^{B16B17} analog peptide. In accordance with the present disclosure analogs of insulin encompass polypeptides comprising an A chain and a B chain wherein the insulin analogs differ from native insulin by one or more amino acid substitutions at positions selected from A5, A8, A9, A10, A12, A14, A15, A17, A18, A21, B1, B2, B3, B4, B5, B9, B10, B13, B14, B17, B20, B21, B22, B23, B26, B27, B28, B29 and B30 or deletions of any or all of positions B1-4 and B26-30.

[0196] In one embodiment the glucagon related peptide component of the conjugate is a peptide selected from the group consisting of native glucagon (SEQ ID NO: 701), native GLP-1 (SEQ ID NO: 703) and native GIP (SEQ ID NO: 707). In one embodiment the glucagon related peptide is a glucagon peptide or GLP-1 peptide. In some embodiments, the glucagon related peptide of the conjugate of the present disclosures is an analog of native human glucagon (SEQ ID NO: 701) comprising an amino acid sequence based on the amino acid sequence of SEQ ID NO: 701 but differing from SEQ ID NO: 701 inasmuch as the amino acid sequence of the glucagon analog comprises one or more (e.g., 1, 2, 3, 4, 5, 6, 7, 8, 9, 10, 11, 12, 13, 14, 15, and in some instances, 16 or more (e.g., 17, 18, 19, 20, 21, 22, 23, 24, 25, etc.), specified or optional amino acid modifications. In some or any embodiments, the peptide of the present disclosures comprises a total of 1, up to 2, up to 3, up to 4, up to 5, up to 6, up to 7, up to 8, up to 9, or up to 10 additional amino acid modifications (e.g., in addition to the specified amino acid modifications), relative to the native human glucagon sequence (SEQ ID NO: 701). For example, in one embodiment an analog of glucagon (SEQ ID NO: 701) comprises (a) an amino acid comprising an imidazole side chain at position 1, (b) an DPP-IV protective amino acid at position 2, (c) an acylated amino acid or alkylated amino acid at any of positions 9, 10, 12, 16, 20, or 37-43, (d) an alpha helix stabilizing amino acid at one or more of positions 16, 17, 18, 19, 20, and 21, and (e) up to ten additional amino acid modifications relative to SEQ ID NO: 701. In one embodiment the present disclosure provides an analog of glucagon comprising (a)-(d) with up to 10 additional amino acid modifications in addition to the amino acid modifications specified in (a)-(d). In some or any embodiments, the modifications are any of those described herein, e.g., acylation, alkylation, pegylation, truncation at C-terminus, substitution of the amino acid at one or more of positions 1, 2, 3, 7, 10, 12, 15, 16, 17, 18, 19, 20, 21, 23, 24, 27, 28, and 29.

### Insulin Peptides

[0197] The insulin peptide component of the conjugates of the present disclosure may comprise the native B and A chain sequences of human insulin (SEQ ID NOs: 1 and 2, respectively) or any of the known analogs or derivatives thereof that exhibit insulin agonist activity when linked to one another in a heteroduplex. Such analogs include, for example, proteins having an A-chain and a B-chain that differ from the A-chain and B-chain of human insulin by having one or more amino acid deletions, one or more amino acid substitutions, and/or one or more amino acid insertions that do not destroy the insulin activity of the insulin analog.

[0198] In one embodiment the insulin peptide is an insulin analog wherein:

[0199] (a) the amino acid residue at position B28 is substituted with Asp, Lys, Leu, Val, or Ala, and the amino acyl residue at position B29 is Lys or Pro;

[0200] (b) the amino acid residues at any of positions B27, B28, B29, and B30 are deleted or substituted with a nonnative amino acid. In one embodiment an insulin analog is provided comprising an Asp substituted at position B28 or a Lys substituted at position 28 and a proline substituted at position B29. Additional insulin analogs are disclosed in Chance, et al., U.S. Pat. No. 5,514,646; Chance, et al., U.S. patent application Ser. No. 08/255,297; Brems, et al., Protein Engineering, 5:527-533 (1992); Brange, et al., EPO Publication No. 214,826 (published Mar. 18, 1987); and Brange, et al., Current Opinion in Structural Biology, 1:934-940 (1991). The disclosures of which are expressly incorporated herein by reference.

[0201] Insulin analogs may also have replacements of the amidated amino acids with acidic forms. For example, Asn may be replaced with Asp or Glu. Likewise, Gln may be replaced with Asp or Glu. In particular, Asn(A18), Asn(A21), or Asp(B3), or any combination of those residues, may be replaced by Asp or Glu. Also, Gln(A15) or Gln(B4), or both, may be replaced by either Asp or Glu.

[0202] As disclosed herein single chain insulin agonists are provided comprising a B chain and an A chain of human insulin, or analogs or derivative thereof, wherein the carboxy terminus of the B chain is linked to the amino terminus of the A chain via a linking moiety. In one embodiment the A chain is an amino acid sequence selected from the group consisting of GIVEQCCTSICSLYQLENYCN (SEQ ID NO: 1), GIVDECCFRSCDLRRLEMYCA (SEQ ID NO: 5) or GIVEECCFRSCDLALLETYCA (SEQ ID NO: 7) and the B chain comprises the sequence FVNQHLCGSHLVEALYLVCGERGFFYTPKT (SEQ ID NO: 2), GPETLCGAELVDALYLVCGDRGFYFNKPT (SEQ ID NO: 6) or AYRPSETLCGGELVDTLYLVCGDRGFYFSRPA (SEQ ID NO: 8), or a carboxy shortened sequence thereof having one to five amino acids corresponding to B26, B27, B28, B29 and B30 deleted, and analogs of those sequences wherein each sequence is modified to comprise one to five amino acid substitutions at positions corresponding to native insulin positions (see peptide alignment shown in FIG. 5) selected from A5, A8, A9, A10, A14, A15, A17, A18, A21, B1, B2, B3, B4, B5, B9, B10, B13, B14, B20, B22, B23, B26, B27, B28, B29 and B30. In one embodiment the amino acid substitutions are conservative amino acid substitutions. Suitable amino acid substitutions at these positions that do not adversely impact insulin's desired activities are known to those skilled in the art, as demonstrated, for example, in Mayer, et al., Insulin Structure and Function, Biopolymers. 2007; 88(5):687-713, the disclosure of which is incorporated herein by reference.

[0203] Additional amino acid sequences can be added to the amino terminus of the B chain or to the carboxy terminus of the A chain of the single chain insulin agonists of the present invention. For example, a series of negatively charged amino acids can be added to the amino terminus of the B chain, including for example a peptide of 1 to 12, 1 to 10, 1 to 8 or 1 to 6 amino acids in length and comprising one or more negatively charged amino acids including for example glutamic acid and aspartic acid. In one embodiment the B chain amino terminal extension comprises 1 to 6 charged amino acids. In one embodiment the B chain amino terminal extension comprises the sequence GX₆₁X₆₂X₆₃X₆₄X₆₅K (SEQ ID NO: 26) or X₆₁X₆₂X₆₃X₆₄X₆₅RK (SEQ ID NO: 27), wherein X₆₁, X₆₂, X₆₃ X₆₄ and X₆₅ are independently glutamic acid or aspartic acid. In one embodiment the B chain comprises the sequence GEEEEEKGPEHLCGAHLVDALYLVCGDX₄₂GFY (SEQ ID NO: 28), wherein X₄₂ is selected from the group consisting of alanine lysine, ornithine and arginine. In accordance with one embodiment the glucagon related peptide-insulin conjugates disclosed herein comprise a C-terminal amide or ester in place of a C-terminal carboxylate on the A chain.

[0204] High potency glucagon related peptide-insulin conjugates can also be prepared based on using a modified IGF I and IGF II sequence described in published International application no. WO 2010/080607, the disclosure of which is expressly incorporated herein by reference, as the insulin peptide component. More particularly, analogs of IGF I and IGF II that comprise a substitution of a tyrosine leucine dipeptide for the native IGF amino acids at positions corresponding to B16 and B17 of native insulin have a tenfold increase in potency at the insulin receptor.

[0205] In accordance with one embodiment the insulin peptide for use in the present disclosure comprises a B chain sequence of R₂₂-X₂₅LCGX₂₉X₃₀LVX₃₃X₃₄LYLVCGX₄₁X₄₂GFX₄₅ (SEQ ID NO: 20) and an A chain sequence of GIVX₄X₅CCX₈X₉X₁₀CX₁₂LX₁₄X₁₅LX₁₇X₁₈X₁₉CX₂₁-R₁₃ (SEQ ID NO: 29) wherein

[0206] X₄ is glutamic acid or aspartic acid;

[0207] X₅ is glutamine or glutamic acid

[0208] X₈ is histidine, threonine or phenylalanine;

[0209] X₉ is serine, arginine, lysine, ornithine or alanine;

[0210] X₁₀ is isoleucine or serine;

[0211] X₁₂ is serine or aspartic acid

[0212] X₁₄ is tyrosine, arginine, lysine, ornithine or alanine;

[0213] X₁₅ is glutamine, glutamic acid, arginine, alanine, lysine, ornithine or leucine;

[0214] X₁₇ is glutamine, glutamic acid, arginine, aspartic acid or lysine, ornithine

[0215] X₁₈ is methionine, asparagine, glutamine, aspartic acid, glutamic acid or threonine;

[0216] X₁₉ is tyrosine, 4-methoxy-phenylalanine or 4-amino phenylalanine;

[0217] X₂₁ is selected from the group consisting of alanine, glycine, serine, valine, threonine, isoleucine, leucine, glutamine, glutamic acid, asparagine, aspartic acid, histidine, tryptophan, tyrosine, and methionine;

[0218] X₂₅ is histidine or threonine;

[0219] X₂₉ is selected from the group consisting of alanine, glycine and serine;

[0220] X₃₀ is selected from the group consisting of histidine, aspartic acid, glutamic acid, homocysteic acid and cysteic acid;

[0221] X₃₃ is selected from the group consisting of aspartic acid, glutamine and glutamic acid;

[0222] X₃₄ is selected from the group consisting of alanine and threonine;

[0223] X₄₁ is selected from the group consisting of glutamic acid, aspartic acid or asparagine;

[0224] X₄₂ is selected from the group consisting of alanine, lysine, ornithine and arginine;

[0225] X₄₅ is tyrosine, histidine, asparagine or phenylalanine;

[0226] R₂₂ is selected from the group consisting of AYRPSE (SEQ ID NO: 14), FVNQ (SEQ ID NO: 12), PGPE (SEQ ID NO: 11), a tripeptide glycine-proline-glutamic acid, a tripeptide valine-asparagine-glutamine, a dipeptide proline-glutamic acid, a dipeptide asparagine-glutamine, glutamine, glutamic acid and a bond; and R₁₃ is COOH or CONH₂. In one embodiment the A chain and the B chain are linked to one another by interchain disulfide bonds, including those that form between the A and B chains of native insulin. In an alternative embodiment the A and B chains are linked together as a linear single chain-insulin peptide.

[0227] In one embodiment the conjugates comprise an insulin peptide wherein the A chain comprises a sequence of GIVEQCCX₁SICSLYQLENX₂CX₃ (SEQ ID NO: 30) and said B chain sequence comprises a sequence of X₄LCGX₅X₆LVEALYLVCGERGFF (SEQ ID NO: 31), wherein

[0228] X₁ is selected from the group consisting of threonine and histidine;

[0229] X₂ is tyrosine, 4-methoxy-phenylalanine or 4-amino phenylalanine;

[0230] X₃ is selected from the group consisting of asparagine and glycine;

[0231] X₄ is selected from the group consisting of histidine and threonine;

[0232] X₅ is selected from the group consisting of alanine, glycine and serine;

[0233] X₆ is selected from the group consisting of histidine, aspartic acid, glutamic acid, homocysteic acid and cysteic acid.

[0234] In accordance with one embodiment an insulin analog is provided wherein the A chain of the insulin peptide comprises the sequence GIVEQCCX₈X₉ICSLYQLENYCX₂₁-R₁₃ (SEQ ID NO: 73) or GIVEQCCX₈SICSLYQLX₁₇NX₁₉CX₂₁ (SEQ ID NO: 32) and the B chain comprising the sequence R₂₂-X₂₅LCGX₂₉X₃₀LVX₃₃X₃₄LYLVCGX₄₁X₄₂GFX₄₅YT-Z₁-B₁ (SEQ ID NO: 142), wherein

[0235] X₈ is selected from the group consisting of threonine and histidine;

[0236] X₉ is valine or tyrosine;

[0237] X₁₇ is glutamine or glutamic acid;

[0238] X₁₉ is tyrosine, 4-methoxy phenylalanine or 4-amino-phenylalanine;

[0239] X₂₁ is asparagine or glycine;

[0240] X₂₅ is histidine or threonine;

[0241] X₂₉ is selected from the group consisting of alanine, glycine and serine;

[0242] X₃₀ is selected from the group consisting of histidine, aspartic acid, glutamic acid, homocysteic acid and cysteic acid;

[0243] X₃₃ is selected from the group consisting of aspartic acid and glutamic acid;

[0244] X₃₄ is selected from the group consisting of alanine and threonine;

[0245] X₄₁ is selected from the group consisting of glutamic acid, aspartic acid or asparagine;

[0246] X₄₂ is selected from the group consisting of alanine, ornithine, lysine and arginine;

[0247] X₄₅ is tyrosine or phenylalanine;

[0248] R₂₂ is selected from the group consisting of FVNQ (SEQ ID NO: 12), a tripeptide valine-asparagine-glutamine, a dipeptide asparagine-glutamine, glutamine and an N-terminal amine

[0249] Z₁ is a dipeptide selected from the group consisting of aspartate-lysine, lysine-proline, and proline-lysine; and

[0250] B₁ is selected from the group consisting of threonine, alanine or a threonine-arginine-arginine tripeptide.

[0251] In accordance with one embodiment an insulin analog is provided wherein the A chain of the insulin peptide comprises the sequence GIVEQCCX₈SICSLYQLX₁₇NX₁₉CX₂₁ (SEQ ID NO: 32) and the B chain comprising the sequence

[0252] X₂₅LCGX₂₉X₃₀LVEALYLVCGERGFF (SEQ ID NO: 33) wherein

[0253] X₈ is selected from the group consisting of threonine and histidine;

[0254] X₁₇ is glutamic acid or glutamine;

[0255] X₁₉ is tyrosine, 4-methoxy-phenylalanine or 4-amino phenylalanine;

[0256] X₂₁ is asparagine or glycine;

[0257] X₂₅ is selected from the group consisting of histidine and threonine;

[0258] X₂₉ is selected from the group consisting of alanine, glycine and serine;

[0259] X₃₀ is selected from the group consisting of histidine, aspartic acid, glutamic acid, homocysteic acid and cysteic acid. In a further embodiment the B chain comprises the sequence X₂₂VNQX₂₅LCGX₂₉X₃₀LVEALYLVCGERGFFYT-Z₁-B₁ (SEQ ID NO: 34)

wherein

[0260] X₂₂ is selected from the group consisting of phenylalanine and desamino-phenylalanine;

[0261] X₂₅ is selected from the group consisting of histidine and threonine;

[0262] X₂₉ is selected from the group consisting of alanine, glycine and serine;

[0263] X₃₀ is selected from the group consisting of histidine, aspartic acid, glutamic acid, homocysteic acid and cysteic acid;

[0264] Z₁ is a dipeptide selected from the group consisting of aspartate-lysine, lysine-proline, and proline-lysine; and

[0265] B₁ is selected from the group consisting of threonine, alanine or a threonine-arginine-arginine tripeptide.

[0266] In accordance with some embodiments the A chain comprises the sequence GIVEQCCX₈SICSLYQLX₁₇NX₁₉CX₂₃ (SEQ ID NO: 32) or GIVDECCX₈X₉SCDLX₁₄X₁₅LX₁₇X₁₈ X₁₉CX₂₁-R₁₃ (SEQ ID NO: 35), and the B chain comprises the sequence X₂₅LCGX₂₉X₃₀LVX₃₃X₃₄LYLVCGDX₄₂GFX₄₅ (SEQ ID NO: 36)

wherein

[0267] X₈ is histidine or phenylalanine;

[0268] X₉ and X₁₄ are independently selected from arginine, lysine, ornithine or alanine;

[0269] X₁₅ is arginine, lysine, ornithine or leucine;

[0270] X₁₇ is glutamic acid or glutamine;

[0271] X₁₈ is methionine, asparagine or threonine;

[0272] X₁₉ is tyrosine, 4-methoxy-phenylalanine or 4-amino phenylalanine;

[0273] X₂₁ is alanine, glycine or asparagine;

[0274] X₂₃ is asparagine or glycine;

[0275] X₂₅ is selected from the group consisting of histidine and threonine;

[0276] X₂₉ is selected from the group consisting of alanine, glycine and serine;

[0277] X₃₀ is selected from the group consisting of histidine, aspartic acid, glutamic acid, homocysteic acid and cysteic acid;

[0278] X₃₃ is selected from the group consisting of aspartic acid and glutamic acid;

[0279] X₃₄ is selected from the group consisting of alanine and threonine;

[0280] X₄₂ is selected from the group consisting of alanine, lysine, ornithine and arginine;

[0281] X₄₅ is tyrosine; and

[0282] R₁₃ is COOH or CONH₂.

[0283] In a further embodiment the A chain comprises the sequence GIVDECCX₈X₉SCDLX₁₄X₁₅LX₁₇X₁₈ X₁₉CX₂₁-R₁₃ (SEQ ID NO: 35), and the B chain comprises the sequence X₂₅LCGX₂₉X₃₀LVX₃₃X₃₄LYLVCGDX₄₂GFX₄₅ (SEQ ID NO: 36)

wherein

[0284] X₈ is histidine;

[0285] X₉ and X₁₄ are independently selected from arginine, lysine, ornithine or alanine;

[0286] X₁₅ is arginine, lysine, ornithine or leucine;

[0287] X₁₇ is glutamic acid, aspartic acid, asparagine, lysine, ornithine or glutamine;

[0288] X₁₈ is methionine, asparagine or threonine;

[0289] X₁₉ is tyrosine, 4-methoxy-phenylalanine or 4-amino phenylalanine;

[0290] X₂₁ is alanine, glycine or asparagine;

[0291] X₂₃ is asparagine or glycine;

[0292] X₂₅ is selected from the group consisting of histidine and threonine;

[0293] X₂₉ is selected from the group consisting of alanine, glycine and serine;

[0294] X₃₀ is selected from the group consisting of histidine, aspartic acid, glutamic acid, homocysteic acid and cysteic acid;

[0295] X₃₃ is selected from the group consisting of aspartic acid and glutamic acid;

[0296] X₃₄ is selected from the group consisting of alanine and threonine;

[0297] X₄₂ is selected from the group consisting of alanine, lysine, ornithine and arginine;

[0298] X₄₅ is tyrosine or phenylalanine and

[0299] R₁₃ is COOH or CONH₂. In a further embodiment the A chain comprises the sequence GIVDECCHX₉SCDLX₁₄X₁₅LX₁₇MX₁₉CX₂₁-R₁₃ (SEQ ID NO: 37), and the B chain comprises the sequence X₂₅LCGAX₃₀LVDALYLVCGDX₄₂GFX₄₅ (SEQ ID NO: 38)

wherein

[0300] X₉, X₁₄ and X₁₅ are independently ornithine, lysine or arginine;

[0301] X₁₇ is glutamic acid or glutamine;

[0302] X₁₉ is tyrosine, 4-methoxy-phenylalanine or 4-amino phenylalanine;

[0303] X₂₁ is alanine, glycine or asparagine;

[0304] X₂₅ is selected from the group consisting of histidine and threonine;

[0305] X₃₀ is selected from the group consisting of histidine, aspartic acid and glutamic acid;

[0306] X₄₂ is selected from the group consisting of alanine, lysine, ornithine and arginine;

[0307] X₄₅ is tyrosine or phenylalanine and

[0308] R₁₃ is COOH or CONH₂. In one embodiment the B chain is selected from the group consisting of HLCGAELVDALYLVCGDX₄₂GFY (SEQ ID NO: 39), GPEHLCGAELVDALYLVCGDX₄₂GFY (SEQ ID NO: 40), GPEHLCGAELVDALYLVCGDX₄₂GFYFNPKT (SEQ ID NO: 41) and GPEHLCGAELVDALYLVCGDX₄₂GFYFNKPT (SEQ ID NO: 42), wherein X₄₂ is selected from the group consisting of ornithine, lysine and arginine. In a further embodiment the A chain comprises the sequence GIVDECCHX₉SCDLX₁₄X₁₅LQMYCN-R₁₃ (SEQ ID NO: 43), wherein X₉, X₁₄ and X₁₅ are independently ornithine, lysine or arginine.

[0309] In another embodiment the A chain comprises the sequence GIVDECCX₈RSCDLYQLENX₁₉CN-R₁₃ (SEQ ID NO: 44) and the B chain comprises the sequence R₂₂-X₂₅LCGSHLVDALYLVCGDX₄₂GFX₄₅ (SEQ ID NO: 45)

[0310] wherein

[0311] X₈ is threonine, histidine or phenylalanine;

[0312] X₁₉ is tyrosine, 4-methoxy-phenylalanine or 4-amino phenylalanine;

[0313] X₂₅ is histidine or threonine;

[0314] X₄₂ is alanine, ornithine or arginine;

[0315] X₄₅ is tyrosine histidine, asparagine or phenylalanine;

[0316] R₂₂ is selected from the group consisting of AYRPSE (SEQ ID NO: 14), FVNQ (SEQ ID NO: 12), PGPE (SEQ ID NO: 11), a tripeptide glycine-proline-glutamic acid, a tripeptide valine-asparagine-glutamine, a dipeptide proline-glutamic acid, a dipeptide asparagine-glutamine, glutamine, glutamic acid and a bond; and R₁₃ is COOH or CONH₂. and

[0317] R₁₃ is COOH or CONH₂.

[0318] In another embodiment the A chain comprises the sequence GIVEQCCHSICSLYQLENX₁₉CX₂₁-R₁₃ (SEQ ID NO: 46) or GIVDECCHRSCDLRRLEMX₁₉CX₂₁-R₁₃ (SEQ ID NO: 47); and the B chain comprises the sequence FVNQHLCGSHLVEALYLVCGERGFFYTPKT (SEQ ID NO: 2), or GPETLCGAELVDALYLVCGDRGFYFNPKT (SEQ ID NO: 48)

wherein

[0319] X₁₉ is tyrosine, 4-methoxy phenylalanine or 4-amino-phenylalanine;

[0320] X₂₁ is alanine, glycine or asparagine

[0321] X₂₆ and X₂₇ are each alanine; and

[0322] X₄₂ is arginine.

### Single Chain Insulin Peptide Agonists

[0323] As disclosed herein linking moieties can be used to link human insulin A and B chains, or analogs or derivatives thereof, wherein the carboxy terminus of the B25 amino acid of the B chain is directly linked to a first end of a linking moiety, wherein the second end of the linking moiety is directly linked to the amino terminus of the A1 amino acid of the A chain via the intervening linking moiety.

[0324] In accordance with one embodiment the insulin peptide is a single chain insulin agonist that comprises the general structure B-LM-A wherein B represents an insulin B chain, A represents an insulin A chain, and LM represents a linking moiety linking the carboxy terminus of the B chain to the amino terminus of the A chain. Suitable linking moieties for joining the B chain to the A chain are disclosed herein under the header Linking Moieties for Single Chain-Insulin Analogs and the respective subheaders “Peptide linkers” and “Non-Peptide Linkers”. In one embodiment the linking moiety comprises a linking peptide, and more particularly, in one embodiment the peptide represents an analog of the IGF-1 C peptide. Additional exemplary peptide linkers include but are not limited to the sequence X₅₁X₅₂GSSSX₅₇X₅₈ (SEQ ID NO: 49) or X₅₁X₅₂GSSSX₅₇X₅₈APQT (SEQ ID NO: 50) wherein X₅₁ is selected from the group consisting of glycine, alanine, valine, leucine, isoleucine and proline, X₅₂ is alanine, valine, leucine, isoleucine or proline and X₅₇ or X₅₈ are independently arginine, lysine, cysteine, homocysteine, acetyl-phenylalanine or ornithine, optionally with a hydrophilic moiety linked to the side chain of the amino acid at position 7 or 8 of the linking moiety (i.e., at the X₅₇ or X₅₈ position). Amino acid positions of the linking moiety are designated based on the corresponding position in the native C chain of IGF 1 (SEQ ID NO: 17). In another embodiment the peptide linking moiety comprises a 29 contiguous amino acid sequence having greater than 70%, 80%, 90% sequence identity to SSSSX₅₀APPPSLPSPSRLPGPSDTPILPQX₅₁ (SEQ ID NO: 68), wherein X₅₀ and X₅₁ are independently selected from arginine and lysine. In one embodiment the linking moiety is a non-peptide linker comprising a relatively short bifunctional non-peptide polymer linker that approximates the length of an 8-16 amino acid sequence. In one embodiment the non-peptide linker has the structure:

[chemical structure]

wherein m is an integer ranging from 10 to 14 and the linking moiety is linked directly to the B25 amino acid of the B chain. In accordance with one embodiment the non-peptide linking moiety is a polyethylene glycol linker of approximately 4 to 20, 8 to 18, 8 to 16, 8 to 14, 8 to 12, 10 to 14, 10 to 12 or 11 to 13 monomers.

[0325] In one embodiment a glucagon related peptide-insulin conjugate is provided that comprises an insulin peptide having the structure: IB-LM-IA, wherein IB comprises the sequence R₂₂-X₂₅LCGX₂₉X₃₀LVX₃₃X₃₄LYLVCGX₄₁X₄₂GFX₄₅ (SEQ ID NO: 20), LM is a linking moiety as disclosed herein that covalently links IB to IA, and IA comprises the sequence GIVX₄X₅CCX₈X₉X₁₀CX₁₂LX₁₄X₁₅LX₁₇X₁₈X₁₉CX₂₁-R₁₃ (SEQ ID NO: 29),

wherein

[0326] X₄ is glutamic acid or aspartic acid;

[0327] X₅ is glutamine or glutamic acid;

[0328] X₈ is histidine or phenylalanine;

[0329] X₉ and X₁₄ are independently selected from arginine, lysine, ornithine or alanine;

[0330] X₁₀ is isoleucine or serine;

[0331] X₁₂ is serine or aspartic acid;

[0332] X₁₄ is tyrosine, arginine, lysine, ornithine or alanine;

[0333] X₁₅ is arginine, lysine, ornithine or leucine;

[0334] X₁₇ is glutamic acid or glutamine;

[0335] X₁₈ is methionine, asparagine or threonine;

[0336] X₁₉ is tyrosine, 4-methoxy-phenylalanine or 4-amino phenylalanine;

[0337] X₂₁ is alanine, glycine or asparagine;

[0338] X₂₅ is selected from the group consisting of histidine and threonine;

[0339] X₂₉ is selected from the group consisting of alanine, glycine and serine;

[0340] X₃₀ is selected from the group consisting of histidine, aspartic acid, glutamic acid, homocysteic acid and cysteic acid;

[0341] X₃₃ is selected from the group consisting of aspartic acid and glutamic acid;

[0342] X₃₄ is selected from the group consisting of alanine and threonine;

[0343] X₄₁ is selected from the group consisting of glutamic acid, aspartic acid or asparagine;

[0344] X₄₂ is selected from the group consisting of alanine, lysine, ornithine and arginine;

[0345] R₂₂ is selected from the group consisting of AYRPSE (SEQ ID NO: 14), FVNQ (SEQ ID NO: 12), PGPE (SEQ ID NO: 11), a tripeptide glycine-proline-glutamic acid, a tripeptide valine-asparagine-glutamine, a dipeptide proline-glutamic acid, a dipeptide asparagine-glutamine, glutamine, glutamic acid and an N-terminal amine; and

[0346] R₁₃ is COOH or CONH₂, further wherein the amino acid at the designation X₄₅ is directly bound to the linking moiety, LM (i.e., the designation IB-LM-IA as used herein is intended to represent that the B chain carboxyl terminus and the amino terminus of the A chain are directly linked to the linking moiety LM without any further intervening amino acids).

[0347] In one embodiment the linking moiety (LM) comprises an amino acid sequence of no more than 17 amino acids in length. In one embodiment the linking moiety comprises the sequence X₅₁X₅₂GSSSX₅₇X₅₈ (SEQ ID NO: 49) or X₅₁X₅₂GSSSX₅₇X₅₈APQT (SEQ ID NO: 50) wherein X₅₁ is selected from the group consisting of glycine, alanine, valine, leucine, isoleucine and proline, X₅₂ is alanine, valine, leucine, isoleucine or proline and X₅₇ or X₅₈ are independently arginine, lysine, cysteine, homocysteine, acetyl-phenylalanine or ornithine, optionally with a hydrophilic moiety linked to the side chain of the amino acid at position 7 or 8 of the linking moiety (i.e., at the X₅₇ or X₅₈ position). Amino acid positions of the linking moiety are designated based on the corresponding position in the native C chain of IGF 1 (SEQ ID NO: 17).

[0348] In another embodiment the linking moiety comprises a 29 contiguous amino acid sequence, directly linked to the carboxy terminal amino acid of the B chain, wherein said 29 contiguous amino acid sequence has greater than 70%, 80%, 90% sequence identity to SSSSX₅₀APPPSLPSPSRLPGPSDTPILPQX₅₁ (SEQ ID NO: 68), wherein X₅₀ and X₅₁ are independently selected from arginine and lysine. In one embodiment the linking peptide comprises a total of 29 to 158 or 29 to 58 amino acids and comprises the sequence of SEQ ID NO: 68. In another embodiment the linking moiety comprises a 29 contiguous amino acid sequence, directly linked to the carboxy terminal amino acid of the B chain, wherein said 29 contiguous amino acid sequence has greater than 90% sequence identity to SSSSX₅₀APPPSLPSPSRLPGPSDTPILPQX₅₁ (SEQ ID NO: 68), wherein X₅₀ and X₅₁ are independently selected from arginine and lysine. In one embodiment the linking moiety comprises the sequence SSSSRAPPPSLPSPSRLPGPSDTPILPQK (SEQ ID NO: 51) or SSSSKAPPPSLPSPSRLPGPSDTPILPQR (SEQ ID NO: 52) optionally with one or two amino acid substitutions.

[0349] In accordance with one embodiment a single chain insulin agonist polypeptide is provided comprising a B chain and A chain of human insulin, or analogs or derivative thereof, wherein the last five carboxy amino acids of the native B chain are deleted (i.e., B26-B30), and amino acid B25 is linked to amino acid A1 of the A chain via an intervening linking moiety. In one embodiment the linking moiety comprises the structure:

[chemical structure]

wherein m is an integer ranging from 10 to 14 and the linking moiety is linked directly to the B25 amino acid of the B chain.

[0350] In one embodiment a glucagon related peptide-insulin conjugate is provided comprising an insulin peptide having the general formula IB-LM-IA wherein IB comprises the sequence GPEHLCGAX₃₀LVDALYLVCGDX₄₂GFYFNX₄₈X₄₉ (SEQ ID NO: 40); LM comprises the sequence SSSSRAPPPSLPSPSRLPGPSDTPILPQK (SEQ ID NO: 51), SSSSKAPPPSLPSPSRLPGPSDTPILPQR (SEQ ID NO: 52), GYGSSSRR (SEQ ID NO: 18) or GAGSSSRR (SEQ ID NO: 22); and

IA comprises the sequence GIVDECCX₈X₉SCDLX₁₄X₁₅LX₁₇X₁₈X₁₉CX₂₁-R₁₃ (SEQ ID NO: 35) wherein

[0351] X₈ is histidine or phenylalanine;

[0352] X₉ is arginine, ornithine or alanine;

[0353] X₁₄ and X₁₅ are both arginine;

[0354] X₁₇ is glutamic acid;

[0355] X₁₉ is tyrosine, 4-methoxy-phenylalanine or 4-amino phenylalanine;

[0356] X₂₁ is alanine or asparagine;

[0357] X₂₅ is histidine or threonine;

[0358] X₃₀ is selected from the group consisting of histidine, aspartic acid, glutamic acid, homocysteic acid and cysteic acid;

[0359] X₄₂ is selected from the group consisting of alanine, ornithine and arginine;

[0360] R₁₃ is COOH.

### Linking Moieties for Single Chain Insulin Analogs

[0361] Peptide Linkers

[0362] In accordance with one embodiment the linking moiety is a peptide or peptidomimetic of 6-18, 8-18, 8-17, 8-12, 8-10, 13-17 or 13-15 amino acids (or amino acid analogs or derivatives thereof). In one embodiment the linking moiety is a peptide or peptidomimetic of 6-18, 8-18, 8-17, 8-12, 8-10, 13-17 or 13-15 amino acids wherein the peptide linking moiety comprises two or more adjacent basic amino acid residues. In accordance with one embodiment the linking moiety is an 8 to 17 non-native amino acid sequence comprising the sequence X₅₁X₅₂X₅₃X₅₄X₅₅X₅₆X₅₇X₅₈ (SEQ ID NO: 9), wherein X₅₁, X₅₂, X₅₃, X₅₄, X₅₅ and X₅₆ are independently any amino acid or amino acid analog or derivative thereof, and X₅₇ and X₅₈ are basic amino acids. In one embodiment the linking moiety is a non-native polypeptide of 8 to 17 amino acids in length and comprising the sequence X₅₁X₅₂X₅₃X₅₄X₅₅X₅₆RR (SEQ ID NO: 10), wherein X₅₂ is a non-aromatic amino acid, including for example alanine. In one embodiment the linking moiety is 8 to 17 amino acids in length and comprises the sequence X₅₁X₅₂GSSSRR (SEQ ID NO: 53) wherein X₅₁ is selected from the group consisting of glycine, alanine, valine, leucine, isoleucine, proline and methionine, and X₅₂ is a non-aromatic amino acid, including for example alanine. In one embodiment the linking moiety is 8 to 17 amino acids in length and comprises a sequence that differs from X₅₁X₅₂GSSSRR (SEQ ID NO: 53) by a single amino acid substitution wherein the amino acid substitution is an amino acid that is pegylated at its side chain, further wherein X₅₁ is selected from the group consisting of glycine, alanine, valine, leucine, isoleucine, proline and methionine, and X₅₂ is a non-aromatic amino acid, including for example alanine.

[0363] In accordance with one embodiment the linking moiety is a derivative of the IGF 1 C chain sequence (GYGSSSRRAPQT; SEQ ID NO: 17). In one embodiment the derivative is a peptide that differs from SEQ ID NO: 17 by a single amino acid substitution of a lysine, cysteine ornithine, homocysteine, or acetyl-phenylalanine residue, and in a further embodiment the lysine, cysteine ornithine, homocysteine, or acetyl-phenylalanine amino acid is pegylated. In one further embodiment the linking moiety is a peptide that differs from SEQ ID NO: 17 by a single lysine substitution. In one specific embodiment the substitution is made at position 8 of SEQ ID NO: 17. Applicants have discovered that use of the IGF 1 C chain sequence and analogs thereof as a linking moiety will generate a single chain insulin polypeptide that has near wild type insulin activity. Furthermore, use of a IGF 1 C chain sequence analog as the linking moiety, wherein position 2 of the IGF 1 C chain sequence is modified, or the carboxy terminal four amino acids are deleted from the IGF 1 C chain sequence, produces a single chain insulin polypeptide that is selective for insulin (i.e., has a higher binding and/or activity at the insulin receptor compared to the IGF-1 receptor). In one embodiment the single chain insulin polypeptide has 5×, 10×, 20×, 30×, 40×, or 50× higher affinity or activity at the insulin receptor relative to the IGF-1 receptor.

[0364] In accordance with one embodiment the linking moiety is a derivative of the IGF 1 C chain sequence (GYGSSSRRAPQT; SEQ ID NO: 17) and comprises a non-native sequence that differs from GYGSSSRR (SEQ ID NO: 18) or GAGSSSRRAPQT (SEQ ID NO: 23) by 1 to 3 amino acid substitutions, or 1 to 2 amino acid substitutions. In one embodiment at least one of the amino acid substitutions is a lysine or cysteine substitution, and in one embodiment the amino acid substitutions are conservative amino acid substitutions. In one embodiment the linking moiety is a peptide (or peptidomimetic) of 8 to 17 amino acids comprising a non-native amino acid sequence that differs from GYGSSSRR (SEQ ID NO: 18) or GAGSSSRRAPQT (SEQ ID NO: 23) by 1 amino acid substitution, including for example substitution with a lysine or cysteine. In one embodiment the linking moiety comprises the sequence GYGSSSRR (SEQ ID NO: 18) or GAGSSSRRAPQT (SEQ ID NO: 23). In one embodiment the linking moiety comprises the sequence GAGSSSRX₅₈APQT (SEQ ID NO: 54), GYGSSSX₅₇X₅₈APQT (SEQ ID NO: 69), or an amino acid that differs from SEQ ID NO: 54 by a single amino acid substitution, wherein X₅₇ is arginine and X₅₈ is arginine, ornithine or lysine, and in a further embodiment a polyethylene glycol chain is linked to the side chain of the amino acid at position 8 of said linking moiety. In another embodiment the linking moiety comprises the sequence GX₅₂GSSSRX₅₈APQT (SEQ ID NO: 55), wherein X₅₂ is any non-aromatic amino acid, including for example, alanine, valine, leucine, isoleucine or proline, and X₅₈ represents an amino acid that has a polyethylene chain covalently linked to its side chain. In one embodiment X₅₈ is a pegylated lysine.

[0365] In another embodiment, the linking moiety is an 8 to 17 amino acid sequence comprising the sequence GX₅₂GSSSRR (SEQ ID NO: 56), wherein X₅₂ is any amino acid, a peptidomimetic of SEQ ID NO: 31, or an analog thereof that differs from SEQ ID NO: 31 by a single amino acid substitution at any of positions 1, 3, 4, 5, 6, 7 or 8 of SEQ ID NO: 31, with the proviso that when the linking peptide is longer than 8 amino acids X₅₂ is other than tyrosine. In accordance with one embodiment the linking moiety comprises an 8-17 amino acid sequence selected from the group consisting of GYGSSSRR (SEQ ID NO: 18), GAGSSSRR (SEQ ID NO: 22), GAGSSSRRA (SEQ ID NO: 57), GAGSSSRRAP (SEQ ID NO: 58), GAGSSSRRAPQ (SEQ ID NO: 59), GAGSSSRRAPQT (SEQ ID NO: 23), PYGSSSRR (SEQ ID NO: 61), PAGSSSRR (SEQ ID NO: 62), PAGSSSRRA (SEQ ID NO: 63), PAGSSSRRAP (SEQ ID NO: 64), PAGSSSRRAPQ (SEQ ID NO: 65), PAGSSSRRAPQT (SEQ ID NO: 66). In accordance with one embodiment the linking moiety comprises an amino acid sequence that differs from GYGSSSRR (SEQ ID NO: 18), GAGSSSRR (SEQ ID NO: 22), GAGSSSRRA (SEQ ID NO: 57), GAGSSSRRAP (SEQ ID NO: 58), GAGSSSRRAPQ (SEQ ID NO: 59), GAGSSSRRAPQT (SEQ ID NO: 23), PYGSSSRR (SEQ ID NO: 61), PAGSSSRR (SEQ ID NO: 62), PAGSSSRRA (SEQ ID NO: 63), PAGSSSRRAP (SEQ ID NO: 64), PAGSSSRRAPQ (SEQ ID NO: 65), PAGSSSRRAPQT (SEQ ID NO: 66) by a single pegylated amino acid including for example a pegylated lysine or pegylated cysteine amino acid substitution. In one embodiment the pegylated amino acid is at position 8 of the linking moiety.

[0366] In one embodiment a peptide sequence named C-terminal peptide (CTP: SSSSKAPPPSLPSPSRLPGPSDTPILPQR; SEQ ID NO: 52), which is prone to O-linked hyperglycosylation when the protein is expressed in a eukaryotic cellular expression system, can be used as a linker peptide. Surprisingly, applicants have discovered that the CTP peptide can be used to connect the B and A chains of insulin to form a single chain insulin analog while still maintaining high in vitro potency in a manner that the native proinsulin C-peptide can not. In one embodiment a glucagon related peptide-insulin conjugate is prepared comprising an insulin peptide having the carboxy terminus of the B chain linked to the amino terminus of the A chain via a CTP peptide. In another embodiment an insulin analog is provided as a two-chain construct with the CTP covalently linked to the C-terminus of the B-chain and/or the amino terminus of the B chain. In vitro and in vivo characterization reveals the CTP modified insulin analogs to have high potency in the absence of glycosylation, thus providing a mechanism to extend insulin action that is based on glycosylation, a natural approach to longer duration proteins.

[0367] Applicants have discovered that the primary sequence of the CTP peptide does not appear to be critical. Accordingly, in one embodiment the linking moiety comprises a peptide having a length of at least 18 amino acids that shares a similar amino acid content. In one embodiment the linking moiety comprises an analog of (SEQ ID NO: 68), wherein said analog differs from (SEQ ID NO: 68) by 1, 2, 3, 4, 5 or 6 amino acid substitutions. In one embodiment the linking peptide comprises a CTP peptide wherein amino acid substitutions are made at one or more positions selected from positions 1, 2, 3, 4, 10, 13, 15, and 21 of (SEQ ID NO: 68). In one embodiment the linking moiety comprises a 29 contiguous amino acid sequence, directly linked to the carboxy terminal amino acid of the B chain, wherein said 29 contiguous amino acid sequence has greater than 60, 80 or 90% sequence identity to SSSSX₅₀APPPSLPSPSRLPGPSDTPILPQX₅₁ (SEQ ID NO: 68), with the proviso that the sequence does not comprise a 15 amino acid sequence identical to a 15 amino acid sequence contained within SEQ ID NO 53. In another embodiment the linking moiety comprises a 29 contiguous amino acid sequence, directly linked to the carboxy terminal amino acid of the B chain, wherein at least 58% of the amino acids comprising the 29 contiguous amino acid sequence are selected from the group consisting of serine and proline.

[0368] In another embodiment the linking moiety comprises a 29 contiguous amino acid sequence, directly linked to the carboxy terminal amino acid of the B chain, wherein said 29 contiguous amino acid sequence has greater than 70%, 80%, 90% sequence identity to SSSSX₅₀APPPSLPSPSRLPGPSDTPILPQX₅₁ (SEQ ID NO: 68), wherein X₅₀ and X₅₁ are independently selected from arginine and lysine, with the proviso that the sequence does not comprise a 15 amino acid sequence identical to a 15 amino acid sequence contained within SEQ ID NO 53. In another embodiment the linking moiety comprises a 29 contiguous amino acid sequence, directly linked to the carboxy terminal amino acid of the B chain, wherein said 29 contiguous amino acid sequence is an analog of (SEQ ID NO: 52), wherein said analog differs from (SEQ ID NO: 52) only by 1, 2, 3, 4, 5 or 6 amino acid modification, and in a further embodiment the amino acid modifications are conservative amino acid substitutions. In another embodiment the linking moiety comprises a 29 contiguous amino acid sequence, directly linked to the carboxy terminal amino acid of the B chain, wherein said 29 contiguous amino acid sequence is an analog of (SEQ ID NO: 52), wherein said analog differs from (SEQ ID NO: 52) only by 1, 2 or 3 amino acid substitutions.

[0369] Applicants have also found that multiple copies of the CTP peptide can be used as the linking peptide in single chain analogs and/or linked to the amino terminus of the B chain in single chain or two chain insulin analogs. The multiple copies of the CTP peptide can be identical or can differ in sequence and can be arranged in a head to tail or head to head orientation. In accordance with one embodiment an insulin analog is provided comprising a CTP peptide having the sequence (SSSSX₅₀APPPSLPSPSRLPGPSDTPILPQX₅₁)ₙ (SEQ ID NO: 68), wherein n is an integer selected from the group consisting of 1, 2, 3 and 4 and X₅₀ and X₅₁ are independently selected from arginine and lysine.

[0370] In one embodiment the CTP peptide comprises the sequence SSSSX₅₀APPPSLPSPSRLPGPSDTPILPQX₅₁ (SEQ ID NO: 68), wherein X₅₀ and X₅₁ are independently selected from arginine and lysine. In another embodiment the CTP peptide comprises a sequence selected from the group consisting of SSSSRAPPPSLPSPSRLPGPSDTPILPQK (SEQ ID NO: 51), SSSSKAPPPSLPSPSRLPGPSDTPILPQR (SEQ ID NO: 52) or SSSSRAPPPSLPSPSRLPGPSDTPILPQ (SEQ ID NO: 67), and in a further embodiment the CTP peptide comprises the sequence SSSSRAPPPSLPSPSRLPGPSDTPILPQK (SEQ ID NO: 53).

### Glycosylation

[0371] During nascent in vivo protein production insulin analogs comprising glycosylation sites may undergo further processing, known as post-translational modification, wherein sugar (glycosyl) residues may be added enzymatically in a process known as glycosylation. The resulting proteins bearing covalently linked oligosaccharide side chains are known as glycosylated proteins or glycoproteins. Accordingly, a protein that bears a glycosylation site is not necessarily glycosylated. In accordance with one embodiment insulin agonists analogs are provided that have been modified to comprise a peptide sequence that is prone to hyperglycosylation when expressed in a eukaryotic expression system.

[0372] Non-native and native glycosylation sequences are known to those skilled in the art and include N-linked glycosylation sites, and O-linked glycosylation sites. N-linked glycosylation sites are peptide sequences that serve as recognition sites for enzymatic attachment of a carbohydrate moiety to the side chain of an asparagine residue. The tripeptide O-linked glycosylation sequences include asparagine-X-serine and asparagine-X-threonine, where X is any amino acid except proline. Thus, the presence of either of these tripeptide sequences in a polypeptide creates a potential glycosylation site. O-linked glycosylation are peptide sequences that serve as recognition sites for enzymatic attachment of a carbohydrate moiety to the side chain of a hydroxyamino acid, most commonly serine or threonine, although 5-hydroxyproline or 5-hydroxylysine may also be used. In one embodiment the O-linked glycosylation sugar is N-aceylgalactosamine, galactose, or xylose. A number of O-linked glycosylation sites are known in the art and have been reported in the literature. See, e.g., Ten Hagen et al. (11029) J. Biol. Chem. 274(39):27867-74; Hanisch et al. (2001) Glycobiology 11:731-740; and Ten Hagen et al. (2003) Glycobiology 13:1R-16R.

[0373] In accordance with one embodiment a method of producing a hyperglycosylated insulin analog is provided. The method comprises providing a eukaryotic host cell that comprises a gene encoding an insulin analog that has been modified to include a non-native glycosylation site (e.g., a CTP peptide sequence) and culturing the cell under conditions that allow expression of the insulin analog gene. In one embodiment the host cell expresses human glycosylation enzymes such that glycosylated proteins (glycoproteins) produced in the host cell exhibit protein glycosylation identical to that of human cells (see US Patent Application Publication Nos. 2004/0018590 and 2002/0137134, the disclosures of which are incorporated herein by reference). In accordance with one embodiment the eukaryotic host cell is selected from yeast (e.g., Pichia pastoris) or mammalian (CHO or HEK293) cells.

[0374] In accordance with one embodiment an insulin analog is provided wherein a glycosylation site has been introduced into the insulin peptide. In one embodiment an insulin analog, either a two chain or single chain analog, is provided wherein a peptide comprising a glycosylation site has been linked to the carboxy terminus of the insulin B chain. In one embodiment a single chain insulin analog is provided comprising a linking moiety that covalently joins the carboxy terminus of an insulin B chain to the amino terminus of an insulin A chain, wherein the linking moiety comprises an amino acid sequence of greater than 18 residues and comprises one or more glycosylation sites. In a further embodiment an insulin analog is provided comprising two peptide sequences that each contain at least one glycosylation site (either the same or different). In one embodiment, a first peptide sequence containing a glycosylation site is linked to the N terminus of the B chain and the second peptide sequence containing a glycosylation site is linked to the C-terminus of the A or B chain. In one embodiment the insulin analog is a single chain analog wherein the linking moiety joining the B and A chains comprises the second peptide sequence.

[0375] In one embodiment a glycosylation site is introduced by the addition of amino acid sequences to the base insulin analog. More particularly, applicants have discovered that peptide sequence named C-terminal peptide (CTP: SSSSKAPPPSLPSPSRLPGPSDTPILPQR; SEQ ID NO: 52), which is prone to O-linked hyperglycosylation when the protein is expressed in a eukaryotic cellular expression system can be covalently linked to an insulin analog without undermining the inherent in vitro activity of the insulin analog.

[0376] In accordance with one embodiment an insulin analog is provided comprising A chain and a B chain and a CTP peptide, wherein the CTP peptide is a peptide having at least 60, 70, 80, 85, 90, or 95% sequence identity with (SEQ ID NO: 52). In one embodiment the CTP peptide is a peptide comprising a 18 to 29 amino acid sequence that shares at least 80, 82, 84, 86, 88, 90, 92, 94, 96 or 98% sequence identity with a 18 to 29 amino acid region of (SEQ ID NO: 52). In one embodiment the CTP peptide comprises an analog of (SEQ ID NO: 52), wherein said analog differs from (SEQ ID NO: 52) by 1, 1 to 2, 3 to 4, 4 to 6 or up to 8 amino acid substitutions. In one embodiment the amino acid substitution are at one or more positions selected from 1-4, 7-15, 18, 20, 21, 24 and 27 of (SEQ ID NO: 52). In one embodiment the amino acid substitution are at one or more positions selected from 1, 2, 3, 4, 10, 13, 15, and 21 of (SEQ ID NO: 52). In one embodiment the amino acid substitution are at one or more positions selected from 7, 8, 9, 12, 14, 18, 20, 24 and 27 of (SEQ ID NO: 52). In one embodiment the CTP peptide comprises a 29 amino acids sequence that differs from SEQ ID NO: 68 by 1 to 2 amino acid substitutions. In a further embodiment the CTP peptide comprises a fragment of SEQ ID NO: 52 wherein the fragment represents a 18 to 28 contiguous amino acid sequence identical to an amino acid sequence contained within SEQ ID NO: 52. In one embodiment the CTP peptide consists of SEQ ID NO: 68, SEQ ID NO: 52 or SEQ ID NO: 51.

[0377] In accordance with one embodiment the CTP peptide comprises a peptide of the sequence SSSSX₅₀APPPSLPSPSRLPGPSDTPILPQX₅₁ (SEQ ID NO: 68), wherein X₅₀ and X₅₁ are independently arginine or lysine, or a peptide that differs from SSSSX₅₀APPPSLPSPSRLPGPSDTPILPQX₅₁ (SEQ ID NO: 68) by one or two amino acid modifications. In one embodiment the CTP peptide is a 29 amino acid sequence comprising a sequence selected from the group consisting of SSSSRAPPPSLPSPSRLPGPSDTPILPQK (SEQ ID NO: 51), SSSSKAPPPSLPSPSRLPGPSDTPILPQR (SEQ ID NO: 52) and SSSSRAPPPSLPSPSRLPGPSDTPILPQ (SEQ ID NO: 67). In one embodiment the CTP peptide comprises the sequence (SSSSX₅₀APPPSLPSPSRLPGPSDTPILPQX₅₁)ₙ (SEQ ID NO: 68), wherein n is an integer selected from the group consisting of 1, 2, 3 and 4, and in a further embodiment n is 1 or 2. In a further embodiment a first CTP peptide is linked to the N-terminus of the B chain and a second CTP peptide is linked to the carboxy terminus of the B chain, wherein the first and second CTP peptides comprise sequences independently selected from the group consisting of SEQ ID NO: 51, SEQ ID NO: 52, SEQ ID NO: 68 and SEQ ID NO: 67.

[0378] Non-Peptide Linkers

[0379] In one embodiment the linking moiety is a relatively short bifunctional non-peptide polymer linker that approximates the length of an 8-16 amino acid sequence. In accordance with one embodiment the non-peptide linking moiety is a polyethylene glycol linker of approximately 4 to 20, 8 to 18, 8 to 16, 8 to 14, 10 to 14, 10 to 12 or 11 to 13 monomers. In one embodiment a single chain insulin agonist is provided wherein the last five carboxy amino acids of the native B chain are deleted, and amino acid B25 is directly linked to the linking moiety by a covalent bond. The second end of the linking moiety is covalently bound to amino acid A1 of the A chain thus linking the B and A chain via the linking moiety. In one embodiment the linking moiety is a linear polyethylene glycol linking moiety comprising at least 10 but no more than 16 monomer units and in another embodiment the polyethylene glycol linking moiety comprises at least 12 but no more than 16 monomer units, and in a further embodiment the polyethylene glycol linking moiety comprises at least 10 but no more than 14 monomer units.

[0380] In accordance with one embodiment the polyethylene glycol linking moiety comprises the structure:

[chemical structure]

[0381] wherein m is an integer ranging from 6 to 18, 8 to 16, 10 to 14 or 11 to 13. In one embodiment m is an integer selected from 10, 11, 12, 13 or 14. In one embodiment m is 12.

[0382] In one embodiment a single chain insulin agonist is provided wherein the last five carboxy amino acids of the native B chain are deleted, and amino acid B25 is linked to amino acid A1 of the A chain via a linking moiety comprising polyethylene glycol of at least 8 but no more than 16 monomer units and an amino acid sequence of one to four amino acids. In accordance with one embodiment the linking moiety comprises a 1-4 amino acid sequence and a linear polyethylene glycol of at least 8 but less than 14 monomer units in length covalently bound to said 1-4 amino acid sequence, with the proviso that the amino acid sequence is not YTPK (SEQ ID NO: 70) or FNKP (SEQ ID NO: 71). In another embodiment a single chain insulin agonist is provided wherein the last five carboxy amino acids of the native B chain are deleted, and amino acid B25 is linked to amino acid A1 of the A chain via a linking moiety comprising a polyethylene glycol of at least 8 but less than 14 monomer units in length and a 2-5 amino acid sequence. The 2-5 amino acid sequence can be located between the B chain and the polyethylene glycol chain or between the A chain and the polyethylene glycol chain. However, when the 2-5 amino acid sequence is located between the B chain and the polyethylene glycol chain, the amino acid sequence is not YTPKT (SEQ ID NO: 16) or FNKPT (SEQ ID NO: 76).

[0383] In one embodiment the linking moiety comprises the general structure: W₁-Z₁-Y₁

[0384] wherein

[0385] W₁ and Y₁ are independently a bond, X₄₆, X₄₆X₄₇, X₄₆X₄₇X₄₈, X₄₆X₄₇X₄₈X₄₉ (SEQ ID NO: 24) or X₄₆X₄₇X₄₈X₄₉X₅₀ (SEQ ID NO: 13), with the proviso that W₁ is not YTPK (SEQ ID NO: 70) or FNKP (SEQ ID NO: 71) and Z₁ represents a polyethylene glycol of the general structure

[chemical structure]

[0386] wherein m is an integer ranging from 6-14, and each of X₄₆, X₄₇, X₄₈, X₄₉ and X₅₀ are independently any amino acid. In one embodiment X₄₆, X₄₇, X₄₈, X₄₉ and X₅₀ are independently any non-native amino acid relative to positions B26-B30 of insulin or IGF-1. In one embodiment X₄₆, X₄₇, X₄₈, X₄₉ and X₅₀ are independently selected from the group consisting of glycine, alanine, valine, leucine, isoleucine, serine, threonine and proline, and in a further embodiment X₄₆, X₄₇, X₄₈, X₄₉ and X₅₀ are independently selected from the group consisting of glycine, alanine, valine, leucine and isoleucine. In one embodiment, W₁ is a bond and Y₁ is X₄₆, X₄₆X₄₇ or X₄₆X₄₇X₄₈ (SEQ ID NO: 15) wherein X₄₆, X₄₇ and X₄₈ are each alanine and Z is a polyethylene glycol of 4-14 monomer units. In one embodiment, Y₁ is a bond and W₁ is X₄₆, X₄₆X₄₇ or X₄₆X₄₇X₄₈ (SEQ ID NO: 15) wherein X₄₆, X₄₇ and X₄₈ are each alanine and Z is a polyethylene glycol of 4-14 monomer units.

[0387] In one embodiment a single chain insulin analog is provided comprising an A chain and a C-terminally truncated B chain, having amino acids B26-B30 (relative to the native insulin sequence) removed, wherein said A chain and B chain are human insulin sequences, or analogs or derivatives thereof, further wherein the carboxy terminus of the B25 amino acid of the B chain is directly linked to a first end of a linking moiety and a second end of the linking moiety is directly linked to the amino terminus of the A1 amino acid of the A chain. In one embodiment the truncated B chain comprises the sequence of SEQ ID NO: 20 wherein the B25 amino acid is directly linked to the N terminus of the linking peptide. In this embodiment the

linking moiety comprises either
[0388] a) a polyethylene glycol of 6-16 monomer units;
[0389] b) a non-native amino acid sequence of at least 8 amino acids and no more than 17 amino acid in length; or
[0390] c) a combination of said polyethylene glycol and a non-native amino acid sequence of 1 to 4 amino acids;

[0391] Pegylation of Insulin Peptides

[0392] Applicants have discovered that covalent linkage of a hydrophilic moiety to the insulin single chain analogs disclosed herein provide analogs having slower onset, extended duration and exhibit a basal profile of activity. In one embodiment, the insulin peptides disclosed herein are further modified to comprise a hydrophilic moiety covalently linked to the side chain of an amino acid at a position selected from the group consisting of A9, A14 and A15 of the A chain or at the N-terminal alpha amine of the B chain (e.g. at position B1 for insulin based B chain or position B2 for IGF-1 based B chain) or at the side chain of an amino acid at position B1, B2, B10, B22, B28 or B29 of the B chain or at any position of the linking moiety that links the A chain and B chain. In exemplary embodiments, this hydrophilic moiety is covalently linked to a Lys, Cys, Orn, homocysteine, or acetyl-phenylalanine residue at any of these positions. In one embodiment the hydrophilic moiety is covalently linked to the side chain of an amino acid of the linking moiety.

[0393] Exemplary hydrophilic moieties include polyethylene glycol (PEG), for example, of a molecular weight of about 1,000 Daltons to about 40,000 Daltons, or about 20,000 Daltons to about 40,000 Daltons. Additional suitable hydrophilic moieties include, polypropylene glycol, polyoxyethylated polyols (e.g., POG), polyoxyethylated sorbitol, polyoxyethylated glucose, polyoxyethylated glycerol (POG), polyoxyalkylenes, polyethylene glycol propionaldehyde, copolymers of ethylene glycol/propylene glycol, monomethoxy-polyethylene glycol, mono-(C1-C10) alkoxy- or aryloxy-polyethylene glycol, carboxymethylcellulose, polyacetals, polyvinyl alcohol (PVA), polyvinyl pyrrolidone, poly-1,3-dioxolane, poly-1,3,6-trioxane, ethylene/maleic anhydride copolymer, poly (beta-amino acids) (either homopolymers or random copolymers), poly(n-vinyl pyrrolidone)polyethylene glycol, propropylene glycol homopolymers (PPG) and other polyakylene oxides, polypropylene oxide/ethylene oxide copolymers, colonic acids or other polysaccharide polymers, Ficoll or dextran and mixtures thereof.

[0394] The hydrophilic moiety, e.g., polyethylene glycol chain in accordance with some embodiments has a molecular weight selected from the range of about 500 to about 40,000 Daltons. In one embodiment the hydrophilic moiety, e.g. PEG, has a molecular weight selected from the range of about 500 to about 5,000 Daltons, or about 1,000 to about 5,000 Daltons. In another embodiment the hydrophilic moiety, e.g., PEG, has a molecular weight of about 10,000 to about 20,000 Daltons. In yet other exemplary embodiment the hydrophilic moiety, e.g., PEG, has a molecular weight of about 20,000 to about 40,000 Daltons. In one embodiment the hydrophilic moiety, e.g. PEG, has a molecular weight of about 20,000 Daltons. In one embodiment an insulin peptide is provided wherein one or more amino acids of the analog are pegylated, and the combined molecular weight of the covalently linked PEG chains is about 20,000 Daltons.

[0395] In one embodiment dextrans are used as the hydrophilic moiety. Dextrans are polysaccharide polymers of glucose subunits, predominantly linked by cd-6 linkages. Dextran is available in many molecular weight ranges, e.g., about 1 kD to about 100 kD, or from about 5, 10, 15 or 20 kD to about 20, 30, 40, 50, 60, 70, 80 or 90 kD.

[0396] Linear or branched polymers are contemplated. Resulting preparations of conjugates may be essentially monodisperse or polydisperse, and may have about 0.5, 0.7, 1, 1.2, 1.5 or 2 polymer moieties per peptide.

[0397] In one embodiment the hydrophilic moiety is a polyethylene glycol (PEG) chain, optionally linked to the side chain of an amino acid at a position selected from the group consisting of A9, A14 and A15 of the A chain, positions B1, B2, B10, B22, B28 or B29 of the B chain, at the N-terminal alpha amine of the B chain, or at any position of the linking moiety of a single chain insulin analog that links the A chain and B chain, including for example at position C8. In one embodiment the single chain insulin analog comprises a peptide linking moiety of 8 to 12 amino acids, wherein one of the amino acids of the linking moiety has a polyethylene chain covalently bound to its side chain. In one embodiment the single chain insulin analog comprises a peptide linking moiety of 8 to 12 amino acids, wherein an amino acid of the linking moiety is pegylated and one or more amino acid at a position selected from the group consisting of A9, A14 and A15 of the A chain, positions B1, B2, B10, B22, B28 or B29 of the B chain is also pegylated. In one embodiment the total molecular weight of the covalently linked PEG chain(s) is about 20,000 Daltons.

[0398] In one embodiment a single chain insulin analog comprises a linking moiety of 8 to 12 amino acids, wherein one of the amino acids of the linking moiety has a 20,000 Dalton polyethylene chain covalently bound to its side chain. In another embodiment a insulin analog comprises a peptide linking moiety of 8 to 12 amino acids, wherein one of the amino acids of the linking moiety has a polyethylene chain covalently bound to its side chain and a second PEG chain is linked to the N-terminal alpha amine of the B chain (e.g. at position B1 for insulin based B chain or position B2 for IGF-1 based B chain) or at the side chain of an amino acid at position B1, B2 and B29 of the B chain. In one embodiment when two PEG chains are linked to the insulin peptide, each PEG chain has a molecular weight of about 10,000 Daltons. In one embodiment when the PEG chain is linked to an 8 to 12 amino acid linking moiety, the PEG chain is linked at position C7 or C8 of the linking moiety and in one embodiment the PEG chain is linked at position C8 of the linking moiety. In one embodiment when two PEG chains are linked to the single chain insulin analog, with one PEG chain linked at position C8 and the second PEG is linked at A9, A14, A15, B1, B2, B10, B22, B28 or B29.

[0399] Hydrophilic moieties such as polyethylene glycol can be attached to the glucagon related peptide-insulin conjugate under any suitable conditions used to react a protein with an activated polymer molecule. Any means known in the art can be used, including via acylation, reductive alkylation, Michael addition, thiol alkylation or other chemoselective conjugation/ligation methods through a reactive group on the PEG moiety (e.g., an aldehyde, amino, ester, thiol, α-haloacetyl, maleimido or hydrazino group) to a reactive group on the target compound (e.g., an aldehyde, amino, ester, thiol, α-haloacetyl, maleimido or hydrazino group). Activating groups which can be used to link the water soluble polymer to one or more proteins include without limitation sulfone, maleimide, sulfhydryl, thiol, triflate, tresylate, azidirine, oxirane and 5-pyridyl. If attached to the peptide by reductive alkylation, the polymer selected should have a single reactive aldehyde so that the degree of polymerization is controlled. See, for example, Kinstler et al., Adv. Drug. Delivery Rev. 54: 477-485 (2002); Roberts et al., Adv. Drug Delivery Rev. 54: 459-476 (2002); and Zalipsky et al., Adv. Drug Delivery Rev. 16: 157-182 (1995).

### Acylation

[0400] In some embodiments, the insulin analog is modified to comprise an acyl group. The acyl group can be covalently linked directly to an amino acid of the glucagon related peptide-insulin conjugate, or indirectly to an amino acid of the glucagon related peptide-insulin conjugate via a spacer, wherein the spacer is positioned between the amino acid of the glucagon related peptide-insulin conjugate and the acyl group. The glucagon related peptide-insulin conjugate may be acylated at the same amino acid position where a hydrophilic moiety is linked, or at a different amino acid position. For example, acylation may occur at any position including any of amino acid of the A or B chains as well as a position within the linking moiety, provided that the activity exhibited by the non-acylated glucagon related peptide-insulin conjugate is retained upon acylation. Nonlimiting examples include acylation at positions A14 and A15 of the A chain, positions position B1 for insulin based B chain or position B2 for IGF-1 based B chain or positions B10, B22, B28 or B29 of the B chain or at any position of the linking moiety.

[0401] In one specific aspect of the invention, the insulin analog is modified to comprise an acyl group by direct acylation of an amine, hydroxyl, or thiol of a side chain of an amino acid of the glucagon related peptide-insulin conjugate. In some embodiments, the insulin analog is directly acylated through the side chain amine, hydroxyl, or thiol of an amino acid. In some embodiments, acylation is at position B28 or B29 (according to the amino acid numbering of the native insulin A and B chain sequences). In this regard, an insulin analog can be provided that has been modified by one or more amino acid substitutions in the A or B chain sequence, including for example at positions A14, A15, B1, B2, B10, B22, B28 or B29 (according to the amino acid numbering of the native insulin A and B chain sequences) or at any position of the linking moiety with an amino acid comprising a side chain amine, hydroxyl, or thiol. In some specific embodiments of the invention, the direct acylation of the insulin peptide occurs through the side chain amine, hydroxyl, or thiol of the amino acid at position B28 or B29 (according to the amino acid numbering of the native insulin A and B chain sequences).

[0402] In accordance with one embodiment, the acylated insulin analogs comprise a spacer between the peptide and the acyl group. In some embodiments, the glucagon related peptide-insulin conjugate is covalently bound to the spacer, which is covalently bound to the acyl group. In some exemplary embodiments, the insulin peptide is modified to comprise an acyl group by acylation of an amine, hydroxyl, or thiol of a spacer, which spacer is attached to a side chain of an amino acid at position B28 or B29 (according to the amino acid numbering of the A or B chain of native insulin), or at any position of the spacer moiety. The amino acid of the glucagon related peptide-insulin conjugate to which the spacer is attached can be any amino acid comprising a moiety which permits linkage to the spacer. For example, an amino acid comprising a side chain —NH₂, —OH, or —COOH (e.g., Lys, Orn, Ser, Asp, or Glu) is suitable.

[0403] In some embodiments, the spacer between the glucagon related peptide-insulin conjugate and the acyl group is an amino acid comprising a side chain amine, hydroxyl, or thiol (or a dipeptide or tripeptide comprising an amino acid comprising a side chain amine, hydroxyl, or thiol). In some embodiments, the spacer comprises a hydrophilic bifunctional spacer. In a specific embodiment, the spacer comprises an amino poly(alkyloxy)carboxylate. In this regard, the spacer can comprise, for example, NH₂(CH₂CH₂O)ₙ(CH₂)ₘCOOH, wherein m is any integer from 1 to 6 and n is any integer from 2 to 12, such as, e.g., 8-amino-3,6-dioxaoctanoic acid, which is commercially available from Peptides International, Inc. (Louisville, Ky.). In one embodiment, the hydrophilic bifunctional spacer comprises two or more reactive groups, e.g., an amine, a hydroxyl, a thiol, and a carboxyl group or any combinations thereof. In certain embodiments, the hydrophilic bifunctional spacer comprises a hydroxyl group and a carboxylate. In other embodiments, the hydrophilic bifunctional spacer comprises an amine group and a carboxylate. In other embodiments, the hydrophilic bifunctional spacer comprises a thiol group and a carboxylate.

[0404] In some embodiments, the spacer between peptide the glucagon related peptide-insulin conjugate and the acyl group is a hydrophobic bifunctional spacer. Hydrophobic bifunctional spacers are known in the art. See, e.g., Bioconjugate Techniques, G. T. Hermanson (Academic Press, San Diego, Calif., 1996), which is incorporated by reference in its entirety. In accordance with certain embodiments the bifunctional spacer can be a synthetic or naturally occurring amino acid comprising an amino acid backbone that is 3 to 10 atoms in length (e.g., 6-amino hexanoic acid, 5-aminovaleric acid, 7-aminoheptanoic acid, and 8-aminooctanoic acid). Alternatively, the spacer can be a dipeptide or tripeptide spacer having a peptide backbone that is 3 to 10 atoms (e.g., 6 to 10 atoms) in length. Each amino acid of the dipeptide or tripeptide spacer attached to the glucagon related peptide-insulin conjugate can be independently selected from the group consisting of: naturally-occurring and/or non-naturally occurring amino acids, including, for example, any of the D or L isomers of the naturally-occurring amino acids (Ala, Cys, Asp, Glu, Phe, Gly, His, Ile, Lys, Leu, Met, Asn, Pro, Arg, Ser, Thr, Val, Trp, Tyr), or any D or L isomers of the non-naturally occurring amino acids selected from the group consisting of: β-alanine (β-Ala), N-α-methyl-alanine (Me-Ala), aminobutyric acid (Abu), α-aminobutyric acid (γ-Abu), aminohexanoic acid (c-Ahx), aminoisobutyric acid (Aib), aminomethylpyrrole carboxylic acid, aminopiperidinecarboxylic acid, aminoserine (Ams), aminotetrahydropyran-4-carboxylic acid, arginine N-methoxy-N-methyl amide, β-aspartic acid (β-Asp), azetidine carboxylic acid, 3-(2-benzothiazolyl)alanine, α-tert-butylglycine, 2-amino-5-ureido-n-valeric acid (citrulline, Cit), β-Cyclohexylalanine (Cha), acetamidomethyl-cysteine, diaminobutanoic acid (Dab), diaminopropionic acid (Dpr), dihydroxyphenylalanine (DOPA), dimethylthiazolidine (DMTA), γ-Glutamic acid (γ-Glu), homoserine (Hse), hydroxyproline (Hyp), isoleucine N-methoxy-N-methyl amide, methyl-isoleucine (MeIle), isonipecotic acid (Isn), methyl-leucine (MeLeu), methyl-lysine, dimethyl-lysine, trimethyl-lysine, methanoproline, methionine-sulfoxide (Met(O)), methionine-sulfone (Met(O2)), norleucine (Nle), methyl-norleucine (Me-Nle), norvaline (Nva), ornithine (Orn), para-aminobenzoic acid (PABA), penicillamine (Pen), methylphenylalanine (MePhe), 4-Chlorophenylalanine (Phe(4-Cl)), 4-fluorophenylalanine (Phe(4-F)), 4-nitrophenylalanine (Phe(4-NO2)), 4-cyanophenylalanine ((Phe(4-CN)), phenylglycine (Phg), piperidinylalanine, piperidinylglycine, 3,4-dehydroproline, pyrrolidinylalanine, sarcosine (Sar), selenocysteine (Sec), U-Benzyl-phosphoserine, 4-amino-3-hydroxy-6-methylheptanoic acid (Sta), 4-amino-5-cyclohexyl-3-hydroxypentanoic acid (ACHPA), 4-amino-3-hydroxy-5-phenylpentanoic acid (AHPPA), 1,2,3,4,-tetrahydro-isoquinoline-3-carboxylic acid (Tic), tetrahydropyranglycine, thienylalanine (Thi), U-Benzyl-phosphotyrosine, O-Phosphotyrosine, methoxytyrosine, ethoxytyrosine, O-(bis-dimethylamino-phosphono)-tyrosine, tyrosine sulfate tetrabutylamine, methyl-valine (MeVal), 1-amino-1-cyclohexane carboxylic acid (Acx), aminovaleric acid, beta-cyclopropyl-alanine (Cpa), propargylglycine (Prg), allylglycine (Alg), 2-amino-2-cyclohexyl-propanoic acid (2-Cha), tertbutylglycine (Tbg), vinylglycine (Vg), 1-amino-1-cyclopropane carboxylic acid (Acp), 1-amino-1-cyclopentane carboxylic acid (Acpe), alkylated 3-mercaptopropionic acid, 1-amino-1-cyclobutane carboxylic acid (Acb). In some embodiments the dipeptide spacer is selected from the group consisting of: Ala-Ala, β-Ala-β-Ala, Leu-Leu, Pro-Pro, γ-aminobutyric acid-γ-aminobutyric acid, and γ-Glu-γ-Glu.

[0405] The peptide the glucagon related peptide-insulin conjugate can be modified to comprise an acyl group by acylation of a long chain alkane of any size and can comprise any length of carbon chain. The long chain alkane can be linear or branched. In certain aspects, the long chain alkane is a C₄ to C₃₀ alkane. For example, the long chain alkane can be any of a C₄ alkane, C₆ alkane, C₈ alkane, C₁₀ alkane, C₁₂ alkane, C₁₄ alkane, C₁₆ alkane, C₁₈ alkane, C₂₀ alkane, C₂₂ alkane, C₂₄ alkane, C₂₆ alkane, C₂₈ alkane, or a C₃₀ alkane. In some embodiments, the long chain alkane comprises a C₈ to C₂₀ alkane, e.g., a C₁₄ alkane, C₁₆ alkane, or a C₁₈ alkane.

[0406] In some embodiments, an amine, hydroxyl, or thiol group of the glucagon related peptide-insulin conjugate is acylated with a cholesterol acid. In a specific embodiment, the peptide is linked to the cholesterol acid through an alkylated des-amino Cys spacer, i.e., an alkylated 3-mercaptopropionic acid spacer. Suitable methods of peptide acylation via amines, hydroxyls, and thiols are known in the art. See, for example, Miller, Biochem Biophys Res Commun 218: 377-382 (1996); Shimohigashi and Stammer, Int J Pept Protein Res 19: 54-62 (1982); and Previero et al., Biochim Biophys Acta 263: 7-13 (1972) (for methods of acylating through a hydroxyl); and San and Silvius, J Pept Res 66: 169-180 (2005) (for methods of acylating through a thiol); Bioconjugate Chem. “Chemical Modifications of Proteins: History and Applications” pages 1, 2-12 (1990); Hashimoto et al., Pharmaceutical Res. “Synthesis of Palmitoyl Derivatives of Insulin and their Biological Activity” Vol. 6, No: 2 pp. 171-176 (1989).

[0407] The acyl group of the acylated peptide the glucagon related peptide-insulin conjugate can be of any size, e.g., any length carbon chain, and can be linear or branched. In some specific embodiments of the invention, the acyl group is a C₄ to C₃₀ fatty acid. For example, the acyl group can be any of a C₄ fatty acid, C₆ fatty acid, C₈ fatty acid, C₁₀ fatty acid, C₁₂ fatty acid, C₁₄ fatty acid, C₁₆ fatty acid, C₁₈ fatty acid, C₂₀ fatty acid, C₂₂ fatty acid, C₂₄ fatty acid, C₂₆ fatty acid, C₂₈ fatty acid, or a C₃₀ fatty acid. In some embodiments, the acyl group is a C₈ to C₂₀ fatty acid, e.g., a C₁₄ fatty acid or a C₁₆ fatty acid.

[0408] In an alternative embodiment, the acyl group is a bile acid. The bile acid can be any suitable bile acid, including, but not limited to, cholic acid, chenodeoxycholic acid, deoxycholic acid, lithocholic acid, taurocholic acid, glycocholic acid, and cholesterol acid.

### Alkylation

[0409] In some embodiments, the glucagon related peptide-insulin conjugate is modified to comprise an alkyl group. The alkyl group can be covalently linked directly to an amino acid of the insulin analog, or indirectly to an amino acid of the glucagon related peptide-insulin conjugate via a spacer, wherein the spacer is positioned between the amino acid of the glucagon related peptide-insulin conjugate and the alkyl group. The alkyl group can be attached to the glucagon related peptide-insulin conjugate via an ether, thioether, or amino linkage. For example, the glucagon related peptide-insulin conjugate may be alkylated at the same amino acid position where a hydrophilic moiety is linked, or at a different amino acid position. Alkylation can be carried out at any position within the glucagon related peptide-insulin conjugate, including for example in the C-terminal region of the B chain or at a position in the linking moiety, provided that insulin activity is retained. In a specific aspect of the invention, the glucagon related peptide-insulin conjugate is modified to comprise an alkyl group by direct alkylation of an amine, hydroxyl, or thiol of a side chain of an amino acid of the glucagon related peptide-insulin conjugate. In some embodiments, the glucagon related peptide-insulin conjugate is directly alkylated through the side chain amine, hydroxyl, or thiol of an amino acid. In some specific embodiments of the invention, the direct alkylation of the glucagon related peptide-insulin conjugate occurs through the side chain amine, hydroxyl, or thiol of the amino acid at position A14, A15, B1 (for insulin based B chains), B2 (for IGF-1 based B chains), B10, B22, B28 or B29 (according to the amino acid numbering of the A and B chain of native insulin).

[0410] In some embodiments of the invention, the glucagon related peptide-insulin conjugate comprises a spacer between the peptide and the alkyl group. In some embodiments, the glucagon related peptide-insulin conjugate is covalently bound to the spacer, which is covalently bound to the alkyl group. In some exemplary embodiments, the glucagon related peptide-insulin conjugate is modified to comprise an alkyl group by alkylation of an amine, hydroxyl, or thiol of a spacer, wherein the spacer is attached to a side chain of an amino acid at position A14, A15, B1 (for insulin based B chains), B2 (for IGF-1 based B chains), B10, B22, B28 or B29 (according to the amino acid numbering of the A and B chains of native insulin). The amino acid of the glucagon related peptide-insulin conjugate to which the spacer is attached can be any amino acid (e.g., a singly α-substituted amino acid or an α,α-disubstituted amino acid) comprising a moiety which permits linkage to the spacer. An amino acid of the glucagon related peptide-insulin conjugate comprising a side chain —NH₂, —OH, or —COOH (e.g., Lys, Orn, Ser, Asp, or Glu) is suitable. In some embodiments, the spacer between the peptide the glucagon related peptide-insulin conjugate and the alkyl group is an amino acid comprising a side chain amine, hydroxyl, or thiol or a dipeptide or tripeptide comprising an amino acid comprising a side chain amine, hydroxyl, or thiol.

[0411] In the instance in which the alpha amine is alkylated, the spacer amino acid can be any amino acid. For example, the spacer amino acid can be a hydrophobic amino acid, e.g., Gly, Ala, Val, Leu, Ile, Trp, Met, Phe, Tyr. Alternatively, the spacer amino acid can be an acidic residue, e.g., Asp and Glu. In exemplary embodiments, the spacer amino acid can be a hydrophobic amino acid, e.g., Gly, Ala, Val, Leu, Ile, Trp, Met, Phe, Tyr, 6-amino hexanoic acid, 5-aminovaleric acid, 7-aminoheptanoic acid, 8-aminooctanoic acid. Alternatively, the spacer amino acid can be an acidic residue, e.g., Asp and Glu, provided that the alkylation occurs on the alpha amine of the acidic residue. In the instance in which the side chain amine of the spacer amino acid is alkylated, the spacer amino acid is an amino acid comprising a side chain amine, e.g., an amino acid of Formula I (e.g., Lys or Orn). In this instance, it is possible for both the alpha amine and the side chain amine of the spacer amino acid to be alkylated, such that the peptide is dialkylated. Embodiments of the invention include such dialkylated molecules.

[0412] In some embodiments, the spacer comprises a hydrophilic bifunctional spacer. In a specific embodiment, the spacer comprises an amino poly(alkyloxy)carboxylate. In this regard, the spacer can comprise, for example, NH₂(CH₂CH₂O)ₙ (CH₂)ₘCOOH, wherein m is any integer from 1 to 6 and n is any integer from 2 to 12, such as, e.g., 8-amino-3,6-dioxaoctanoic acid, which is commercially available from Peptides International, Inc. (Louisville, Ky.). In some embodiments, the spacer between peptide the glucagon related peptide-insulin conjugate and the alkyl group is a hydrophilic bifunctional spacer. In certain embodiments, the hydrophilic bifunctional spacer comprises two or more reactive groups, e.g., an amine, a hydroxyl, a thiol, and a carboxyl group or any combinations thereof. In certain embodiments, the hydrophilic bifunctional spacer comprises a hydroxyl group and a carboxylate. In other embodiments, the hydrophilic bifunctional spacer comprises an amine group and a carboxylate. In other embodiments, the hydrophilic bifunctional spacer comprises a thiol group and a carboxylate.

[0413] The spacer (e.g., amino acid, dipeptide, tripeptide, hydrophilic bifunctional spacer, or hydrophobic bifunctional spacer) is 3 to 10 atoms (e.g., 6 to 10 atoms, (e.g., 6, 7, 8, 9, or 10 atoms)) in length. In more specific embodiments, the spacer is about 3 to 10 atoms (e.g., 6 to 10 atoms) in length and the alkyl is a C₁₂ to C₁₈ alkyl group, e.g., C₁₄ alkyl group, C₁₆ alkyl group, such that the total length of the spacer and alkyl group is 14 to 28 atoms, e.g., about 14, 15, 16, 17, 18, 19, 20, 21, 22, 23, 24, 25, 26, 27, or 28 atoms. In some embodiments the length of the spacer and alkyl is 17 to 28 (e.g., 19 to 26, 19 to 21) atoms.

[0414] In accordance with one embodiment the bifunctional spacer is a synthetic or non-naturally occurring amino acid comprising an amino acid backbone that is 3 to 10 atoms in length (e.g., 6-amino hexanoic acid, 5-aminovaleric acid, 7-aminoheptanoic acid, and 8-aminooctanoic acid). Alternatively, the spacer can be a dipeptide or tripeptide spacer having a peptide backbone that is 3 to 10 atoms (e.g., 6 to 10 atoms) in length. The dipeptide or tripeptide spacer attached to the glucagon related peptide-insulin conjugate can be composed of naturally-occurring and/or non-naturally occurring amino acids, including, for example, any of the amino acids taught herein. In some embodiments the spacer comprises an overall negative charge, e.g., comprises one or two negatively charged amino acids. In some embodiments the dipeptide spacer is selected from the group consisting of: Ala-Ala, β-Ala-β-Ala, Leu-Leu, Pro-Pro, γ-aminobutyric acid-γ-aminobutyric acid, and γ-Glu-γ-Glu. In one embodiment the dipeptide spacer is γ-Glu-γ-Glu.

[0415] Suitable methods of peptide alkylation via amines, hydroxyls, and thiols are known in the art. For example, a Williamson ether synthesis can be used to form an ether linkage between the insulin peptide and the alkyl group. Also, a nucleophilic substitution reaction of the peptide with an alkyl halide can result in any of an ether, thioether, or amino linkage. The alkyl group of the alkylated peptide the glucagon related peptide-insulin conjugate can be of any size, e.g., any length carbon chain, and can be linear or branched. In some embodiments of the invention, the alkyl group is a C₄ to C₃₀ alkyl. For example, the alkyl group can be any of a C₄ alkyl, C₆ alkyl, C₈ alkyl, C₁₀ alkyl, C₁₂ alkyl, C₁₄ alkyl, C₁₆ alkyl, C₁₈ alkyl, C₂₀ alkyl, C₂₂ alkyl, C₂₄ alkyl, C₂₆ alkyl, C₂₈ alkyl, or a C₃₀ alkyl. In some embodiments, the alkyl group is a C₈ to C₂₀ alkyl, e.g., a C₁₄ alkyl or a C₁₆ alkyl.

[0416] In some specific embodiments, the alkyl group comprises a steroid moiety of a bile acid, e.g., cholic acid, chenodeoxycholic acid, deoxycholic acid, lithocholic acid, taurocholic acid, glycocholic acid, and cholesterol acid.

[0417] When a long chain alkane is alkylated by the glucagon related peptide-insulin conjugate or the spacer, the long chain alkane may be of any size and can comprise any length of carbon chain. The long chain alkane can be linear or branched. In certain aspects, the long chain alkane is a C₄ to C₃₀ alkane. For example, the long chain alkane can be any of a C₄ alkane, C₆ alkane, C₈ alkane, C₁₀ alkane, C₁₂ alkane, C₁₄ alkane, C₁₆ alkane, C₁₈ alkane, C₂₀ alkane, C₂₂ alkane, C₂₄ alkane, C₂₆ alkane, C₂₈ alkane, or a C₃₀ alkane. In some embodiments the long chain alkane comprises a C₈ to C₂₀ alkane, e.g., a C₁₄ alkane, C₁₆ alkane, or a C₁₈ alkane.

[0418] Also, in some embodiments alkylation can occur between the insulin analog and a cholesterol moiety. For example, the hydroxyl group of cholesterol can displace a leaving group on the long chain alkane to form a cholesterol-insulin peptide product.

### Controlled Release Formulations

[0419] Alternatively, the insulin/incretin conjugates described herein can be modified into a depot form, such that the manner in which the conjugate of the present disclosure is released into the body to which it is administered is controlled with respect to time and location within the body (see, for example, U.S. Pat. No. 4,450,150). Depot forms of the conjugates of the present disclosures can be, for example, an implantable composition comprising the conjugate of the present disclosure and a porous or non-porous material, such as a polymer, wherein the conjugate of the present disclosures is encapsulated by or diffused throughout the material and/or degradation of the non-porous material. The depot is then implanted into the desired location within the body and the conjugate of the present disclosures are released from the implant at a predetermined rate.

[0420] Alternatively, a large depot polymer can be linked to a self cleaving dipeptide element that is covalently bound to the conjugate as described herein. In this embodiment, the depot polymer effectively sequesters the glucagon related peptide-insulin conjugate at its site of administration until it is subsequently cleaved from the single chain analog via a non-enzymatic reaction at a predetermined rate. Depot formulations of insulin analogs using a self cleaving dipeptide have been described in published international application no. WO 2010/080607, the disclosure of which is incorporated herein. In one embodiment a glucagon related peptide-insulin conjugate is provided comprising a dipeptide prodrug element wherein the dipeptide prodrug element is linked to a large polymer such as PEG or dextran. In one embodiment a self cleaving dipeptide element comprising a large depot polymer (including for example, PEG) is linked to the side chain of an amino acid of the linking moiety, including for example, the amino acid at position C8 of the linking moiety.

[0421] Pharmaceutical compositions can be prepared that comprise the single chain analogs and are formulated to have a desired in vivo release profile. In some aspects, the pharmaceutical composition is an immediate release, controlled release, sustained release, extended release, delayed release, or bi-phasic release formulation. Methods of formulating peptides or conjugates for controlled release are known in the art. See, for example, J Pharm 374: 46-52 (2009) and International Patent Application Publication Nos. WO 2008/130158, WO2004/033036; WO2000/032218; and WO 1999/040942. The instant compositions may further comprise, for example, micelles or liposomes, or some other encapsulated form, or may be administered in an extended release form to provide a prolonged storage and/or delivery effect. The disclosed pharmaceutical formulations may be administered according to any regime including, for example, daily (1 time per day, 2 times per day, 3 times per day, 4 times per day, 5 times per day, 6 times per day), every two days, every three days, every four days, every five days, every six days, weekly, bi-weekly, every three weeks, monthly, or bi-monthly.

[0422] In accordance with one embodiment the depot polymer is selected from biocompatible polymers known to those skilled in the art. The depot polymers typically have a size selected from a range of about 20,000 to 120,000 Daltons. In one embodiment the depot polymer has a size selected from a range of about 40,000 to 100,000 or about 40,000 to 80,000 Daltons. In one embodiment the depot polymer has a size of about 40,000, 50,000, 60,000, 70,000 or 80,000 Daltons. Suitable depot polymers include but are not limited to dextrans, polylactides, polyglycolides, caprolactone-based polymers, poly(caprolactone), polyanhydrides, polyamines, polyesteramides, polyorthoesters, polydioxanones, polyacetals, polyketals, polycarbonates, polyphosphoesters, polyesters, polybutylene terephthalate, polyorthocarbonates, polyphosphazenes, succinates, poly(malic acid), poly(amino acids), polyvinylpyrrolidone, polyethylene glycol, polyhydroxycellulose, polysaccharides, chitin, chitosan, hyaluronic acid, and copolymers, terpolymers and mixtures thereof, and biodegradable polymers and their copolymers including caprolactone-based polymers, polycaprolactones and copolymers which include polybutylene terephthalate. In one embodiment the depot polymer is selected from the group consisting of polyethylene glycol, dextran, polylactic acid, polyglycolic acid and a copolymer of lactic acid and glycolic acid, and in one specific embodiment the depot polymer is polyethylene glycol. In one embodiment the depot polymer is polyethylene glycol and the combined molecular weight of depot polymer(s) linked to the dipeptide element is about 40,000 to 80,000 Daltons.

[0423] In accordance with one embodiment a self cleaving dipeptide element is provided, comprising the structure U-J, wherein U is an amino acid or a hydroxyl acid and J is an N-alkylated amino acid. In one embodiment one or more dipeptide elements are linked to the glucagon related peptide-insulin conjugate through an amide bond formed through one or more amino groups selected from the N-terminal amino group of the B chain of the insulin component, the N-terminus of the glucagon related peptide component, or the side chain amino group of an amino acid present in the conjugate. In accordance with one embodiment one or more dipeptide elements are linked to the glucagon related peptide-insulin conjugate at an amino group selected from the N-terminal amino group of the conjugate, or the side chain amino group of an aromatic amine of a 4-amino-phenylalanine residue present at a position corresponding to position A19, B16 or B25 of native insulin, or a side chain of an amino acid of the linking moiety of a single chain insulin analog, or the N-terminus of the glucagon related peptide or insulin peptide components of the conjugate.

[0424] In one embodiment the dipeptide prodrug element comprises the general structure of Formula X:

[chemical structure]

[0425] wherein

[0426] R₁, R₂, R₄ and R₈ are independently selected from the group consisting of H, C₁-C₁₈ alkyl, C₂-C₁₈ alkenyl, (C₁-C₁₈ alkyl)OH, (C₁-C₁₈ alkyl)SH, (C₂-C₃ alkyl)SCH₃, (C₁-C₄ alkyl)CONH₂, (C₁-C₄ alkyl)COOH, (C₁-C₄ alkyl)NH₂, (C₁-C₄ alkyl)NHC(NH₂⁺)NH₂, (C₀-C₄ alkyl)(C₃-C₆ cycloalkyl), (C₀-C₄ alkyl)(C₂-C₅ heterocyclic), (C₀-C₄ alkyl)(C₆-C₁₀ aryl)R₇, (C₁-C₄ alkyl)(C₃-C₉ heteroaryl), and C₁-C₁₂ alkyl(W)C₁-C₁₂ alkyl, wherein W is a heteroatom selected from the group consisting of N, S and O, or R₁ and R₂ together with the atoms to which they are attached form a C₃-C₁₂ cycloalkyl or aryl; or R₄ and R₈ together with the atoms to which they are attached form a C₃-C₆ cycloalkyl;

[0427] R₃ is selected from the group consisting of C₁-C₁₈ alkyl, (C₁-C₁₈ alkyl)OH, (C₁-C₁₈ alkyl)NH₂, (C₁-C₁₈ alkyl)SH, (C₀-C₄ alkyl)(C₃-C₆)cycloalkyl, (C₀-C₄ alkyl)(C₂-C₅ heterocyclic), (C₀-C₄ alkyl)(C₆-C₁₀ aryl)R₇, and (C₁-C₄ alkyl)(C₃-C₉ heteroaryl) or R₄ and R₃ together with the atoms to which they are attached form a 4, 5 or 6 member heterocyclic ring;

[0428] R₅ is NHR₆ or OH;

[0429] R₆ is H, C₁-C₈ alkyl or R₆ and R₂ together with the atoms to which they are attached form a 4, 5 or 6 member heterocyclic ring; and

[0430] R₇ is selected from the group consisting of H and OH. In one embodiment when the prodrug element is linked to the N-terminal amine of the glucagon related peptide-insulin conjugate and R₄ and R₃ together with the atoms to which they are attached form a 4, 5 or 6 member heterocyclic ring, then at least one of R₁ and R₂ are other than H.

### Glucagon Related Peptides

[0431] Applicants have discovered analogs of glucagon that have altered activities at the glucagon, GLP1 and GIP receptors. Any of these analogs can be used as the glucagon related peptide in the conjugates described herein. More particularly the glucagon related peptide can be any of the class 1, class 2 or class 3 glucagon peptides described herein.

[0432] Class 1 Glucagon Related Peptides

[0433] In certain embodiments, the glucagon related peptide is a Class 1 glucagon related peptide, which is described herein and in International Patent Application No. PCT US2009/47437 (filed on Jun. 16, 2009) and International Patent Application Publication No. WO 2008/086086, published on Jul. 17, 2008, the contents of which are incorporated by reference in their entirety.

[0434] The biological sequences referenced in the following section (SEQ ID NOs: 801-915) relating to Class 1 glucagon related peptides correspond to SEQ ID NOs: 1-115 in International Patent Application No. PCT US2009/47437.

### Activity

[0435] Class 1 glucagon related peptides retain glucagon receptor activity relative to the native glucagon peptide (SEQ ID NO: 801). For example, the glucagon related peptide can retain at least 10%, 20%, 30%, 40%, 50%, 60%, 70%, 75% activity, 80% activity, 85% activity, or 90% of the activity of native glucagon (calculated as the inverse ratio of EC50s for the glucagon related peptide vs. glucagon, e.g., as measured by cAMP production using the assay generally described in Example 7). In some embodiments, the Class 1 glucagon related peptides have the same or greater activity (used synonymously with the term “potency” herein) than glucagon. In some embodiments, the glucagon related peptides described herein exhibit no more than about 100%, 1000%, 10,000%, 100,000%, or 1,000,000% of the activity of native glucagon peptide.

### Improved Solubility

[0436] Native glucagon exhibits poor solubility in aqueous solution, particularly at physiological pH, with a tendency to aggregate and precipitate over time. In contrast, the Class 1 glucagon related peptides in some embodiments exhibit at least 2-fold, 5-fold, or even higher solubility compared to native glucagon at a pH between 6 and 8, or between 6 and 9, for example, at pH 7 after 24 hours at 25° C.

[0437] Accordingly, in some embodiments, a Class 1 glucagon related peptide has been modified relative to the wild type peptide of His-Ser-Gln-Gly-Thr-Phe-Thr-Ser-Asp-Tyr-Ser-Lys-Tyr-Leu-Asp-Ser-Arg-Arg-Ala-Gln-Asp-Phe-Val-Gln-Trp-Leu-Met-Asn-Thr (SEQ ID NO: 801) to improve the peptide's solubility in aqueous solutions, particularly at a pH ranging from about 5.5 to about 8.0, while retaining the native peptide's biological activity.

[0438] For example, the solubility of any of the Class 1 glucagon related peptides described herein can be further improved by attaching a hydrophilic moiety to the peptide. Introduction of such groups also increases duration of action, e.g. as measured by a prolonged half-life in circulation. Hydrophilic moieties are further described herein.

Modification with Charged Residues

[0439] In some embodiments, solubility is improved by adding charge to the Class 1 glucagon related peptide by the substitution of native non-charged amino acids with charged amino acids selected from the group consisting of lysine, arginine, histidine, aspartic acid and glutamic acid, or by the addition of charged amino acids to the amino or carboxy terminus of the peptide.

[0440] In accordance with some embodiments, the Class 1 glucagon related peptide has improved solubility due to the fact that the peptide is modified by amino acid substitutions and/or additions that introduce a charged amino acid into the C-terminal portion of the peptide, and in some embodiments at a position C-terminal to position 27 of SEQ ID NO: 801. Optionally, one, two or three charged amino acids may be introduced within the C-terminal portion, and in some embodiments C-terminal to position 27. In accordance with some embodiments, the native amino acid(s) at positions 28 and/or 29 are substituted with a charged amino acid, and/or one to three charged amino acids are added to the C-terminus of the peptide, e.g. after position 27, 28 or 29. In exemplary embodiments, one, two, three or all of the charged amino acids are negatively charged. In other embodiments, one, two, three or all of the charged amino acids are positively charged.

[0441] In specific exemplary embodiments, the Class 1 glucagon related peptide may comprise any one or two of the following modifications: substitution of N28 with E; substitution of N28 with D; substitution of T29 with D; substitution of T29 with E; insertion of E after position 27, 28 or 29; insertion of D after position 27, 28 or 29. For example, D28E29, E28E29, E29E30, E28E30, D28E30.

[0442] In accordance with one exemplary embodiment, the Class 1 glucagon related peptide comprises an amino acid sequence of SEQ ID NO: 811, or an analog thereof that contains 1 to 3 further amino acid modifications (described herein in reference to glucagon agonists) relative to native glucagon, or a glucagon agonist analog thereof. SEQ ID NO: 811 represents a modified Class 1 glucagon related peptide, wherein the asparagine residue at position 28 of the native protein has been substituted with an aspartic acid. In another exemplary embodiment the Class 1 glucagon related peptide comprises an amino acid sequence of SEQ ID NO: 838, wherein the asparagine residue at position 28 of the native protein has been substituted with glutamic acid. Other exemplary embodiments include Class 1 glucagon related peptides of SEQ ID NOS: 824, 825, 826, 833, 835, 836 and 837.

### Improved Stability

[0443] Any of the Class 1 glucagon related peptides may additionally exhibit improved stability and/or reduced degradation, for example, retaining at least 95% of the original peptide after 24 hours at 25° C. The Class 1 glucagon related peptides may include additional modifications that alter its pharmaceutical properties, e.g. increased potency, prolonged half-life in circulation, increased shelf-life, reduced precipitation or aggregation, and/or reduced degradation, e.g., reduced occurrence of cleavage or chemical modification after storage.

[0444] In yet further exemplary embodiments, any of the foregoing Class 1 glucagon related peptides can be further modified to improve stability by modifying the amino acid at position 15 of SEQ ID NO: 801 to reduce degradation of the peptide over time, especially in acidic or alkaline buffers. In exemplary embodiments, Asp at position 15 is substituted with a Glu, homo-Glu, cysteic acid, or homo-cysteic acid.

[0445] Alternatively, any of the Class 1 glucagon related peptides described herein can be further modified to improve stability by modifying the amino acid at position 16 of SEQ ID NO: 801. In exemplary embodiments, Ser at position 16 is substituted with Thr or AIB, or any of the amino acids substitutions described herein with regard to Class 1 glucagon related peptides which enhance potency at the glucagon receptor. Such modifications reduce cleavage of the peptide bond between Asp15-Ser16.

[0446] In some embodiments, any of the Class 1 glucagon related peptides described herein can be further modified to reduce degradation at various amino acid positions by modifying any one, two, three, or all four of positions 20, 21, 24, or 27. Exemplary embodiments include substitution of Gln at position 20 with Ser, Thr, Ala or AIB, substitution of Asp at position 21 with Glu, substitution of Gln at position 24 with Ala or AIB, substitution of Met at position 27 with Leu or Nle. Removal or substitution of methionine reduces degradation due to oxidation of the methionine. Removal or substitution of Gln or Asn reduces degradation due to deamidation of Gln or Asn. Removal or substitution of Asp reduces degradation that occurs through dehydration of Asp to form a cyclic succinimide intermediate followed by isomerization to iso-aspartate.

### Enhanced Potency

[0447] In accordance with another embodiment, Class 1 glucagon related peptides are provided that have enhanced potency at the glucagon receptor, wherein the peptides comprise an amino acid modification at position 16 of native glucagon (SEQ ID NO: 801). By way of nonlimiting example, such enhanced potency can be provided by substituting the naturally occurring serine at position 16 with glutamic acid or with another negatively charged amino acid having a side chain with a length of 4 atoms, or alternatively with any one of glutamine, homoglutamic acid, or homocysteic acid, or a charged amino acid having a side chain containing at least one heteroatom, (e.g. N, O, S, P) and with a side chain length of about 4 (or 3-5) atoms. Substitution of serine at position 16 with glutamic acid enhances glucagon activity at least 2-fold, 4-fold, 5-fold and up to 10-fold greater at the glucagon receptor. In some embodiments, the Class 1 glucagon related peptide retains selectivity for the glucagon receptor relative to the GLP-1 receptors, e.g., at least 5-fold, 10-fold, or 15-fold selectivity.

### DPP-IV Resistance

[0448] In some embodiments, the Class 1 glucagon related peptides disclosed herein are further modified at position 1 or 2 to reduce susceptibility to cleavage by dipeptidyl peptidase IV. More particularly, in some embodiments, position 1 and/or position 2 of the Class 1 glucagon related peptide is substituted with the DPP-IV resistant amino acid(s) described herein. In some embodiments, position 2 of the analog peptide is substituted with an amino isobutyric acid. In some embodiments, position 2 of the analog peptide is substituted with an amino acid selected from the group consisting of D-serine, D-alanine, glycine, N-methyl serine, and ε-amino butyric acid. In another embodiment, position 2 of the Class 1 glucagon related peptide is substituted with an amino acid selected from the group consisting of D-serine, glycine, and aminoisobutyric acid. In some embodiments, the amino acid at position 2 is not D-serine.

Reduction in glucagon activity upon modification of the amino acids at position 1 and/or position 2 of the glucagon related peptide can be restored by stabilization of the alpha-helix structure in the C-terminal portion of the glucagon related peptide (around amino acids 12-29). The alpha helix structure can be stabilized by, e.g., formation of a covalent or non-covalent intramolecular bridge (e.g., a lactam bridge between side chains of amino acids at positions “i” and “i+4”, wherein i is an integer from 12 to 25), substitution and/or insertion of amino acids around positions 12-29 with an alpha helix-stabilizing amino acid (e.g., an α,α-disubstituted amino acid), as further described herein.

### Modifications at Position 3

[0449] Glucagon receptor activity can be reduced by an amino acid modification at position 3 (according to the amino acid numbering of wild type glucagon), e.g. substitution of the naturally occurring glutamine at position 3, with an acidic, basic, or a hydrophobic amino acid. For example substitution at position 3 with glutamic acid, ornithine, or norleucine substantially reduces or destroys glucagon receptor activity.

[0450] Maintained or enhanced activity at the glucagon receptor may be achieved by modifying the Gln at position 3 with a glutamine analog as described herein. For example, glucagon agonists can comprise the amino acid sequence of SEQ ID NO: 863, SEQ ID NO: 869, SEQ ID NO: 870, SEQ ID NO: 871, SEQ ID NO: 872, SEQ ID NO: 873 and SEQ ID NO: 874.

Enhancing GLP-1 Activity with C-Terminal Amides and Esters

[0451] Enhanced activity at the GLP-1 receptor is provided by replacing the carboxylic acid of the C-terminal amino acid with a charge-neutral group, such as an amide or ester. Conversely, retaining the native carboxylic acid at the C-terminus of the peptide maintains the relatively greater selectivity of the Class 1 glucagon related peptide for the glucagon receptor vs. the GLP-1 receptor (e.g., greater than about 5, 6, 7, 8, 9, 10, 11, 12, 13, 14, 15, 16, 17, 18, 19, or 20-fold).

### Further Modifications and Combinations

[0452] Additional modifications may be made to the Class 1 glucagon related peptide which may further increase solubility and/or stability and/or glucagon activity. The Class 1 glucagon related peptide may alternatively comprise other modifications that do not substantially affect solubility or stability, and that do not substantially decrease glucagon activity. In exemplary embodiments, the Class 1 glucagon related peptide may comprise a total of up to 11, or up to 12, or up to 13, or up to 14 amino acid modifications relative to the native glucagon sequence. For example, conservative or non-conservative substitutions, additions or deletions may be carried out at any of positions 2, 5, 7, 10, 11, 12, 13, 14, 17, 18, 19, 20, 21, 24, 27, 28 or 29.

Exemplary modifications of the Class 1 glucagon related peptide include but are not limited to:

[0453] (a) non-conservative substitutions, conservative substitutions, additions or deletions while retaining at least partial glucagon agonist activity, for example, conservative substitutions at one or more of positions 2, 5, 7, 10, 11, 12, 13, 14, 16, 17, 18, 19, 20, 21, 24, 27, 28 or 29, substitution of Tyr at position 10 with Val or Phe, substitution of Lys at position 12 with Arg, substitution of one or more of these positions with Ala;

[0454] (b) deletion of amino acids at positions 29 and/or 28, and optionally position 27, while retaining at least partial glucagon agonist activity;

[0455] (c) modification of the aspartic acid at position 15, for example, by substitution with glutamic acid, homoglutamic acid, cysteic acid or homocysteic acid, which may reduce degradation; or modification of the serine at position 16, for example, by substitution of threonine, AIB, glutamic acid or with another negatively charged amino acid having a side chain with a length of 4 atoms, or alternatively with any one of glutamine, homoglutamic acid, or homocysteic acid, which likewise may reduce degradation due to cleavage of the Asp15-Ser16 bond;

[0456] (d) addition of a hydrophilic moiety such as the water soluble polymer polyethylene glycol, as described herein, e.g. at position 16, 17, 20, 21, 24, 29, 40 or at the C-terminal amino acid, which may increase solubility and/or half-life;

[0457] (e) modification of the methionine at position 27, for example, by substitution with leucine or norleucine, to reduce oxidative degradation;

[0458] (f) modification of the Gln at position 20 or 24, e.g. by substitution with Ser, Thr, Ala or AIB, to reduce degradation that occurs through deamidation of Gln

[0459] (g) modification of Asp at position 21, e.g. by substitution with Glu, to reduce degradation that occurs through dehydration of Asp to form a cyclic succinimide intermediate followed by isomerization to iso-aspartate;

[0460] (h) modifications at position 1 or 2 as described herein that improve resistance to DPP-IV cleavage, optionally in combination with an intramolecular bridge such as a lactam bridge between positions “i” and “i+4”, wherein i is an integer from 12 to 25, e.g., 12, 16, 20, 24;

[0461] (i) acylating or alkylating the glucagon related peptide as described herein, which may increase the activity at the glucagon receptor and/or the GLP-1 receptor, increase half-life in circulation and/or extending the duration of action and/or delaying the onset of action, optionally combined with addition of a hydrophilic moiety, additionally or alternatively, optionally combined with a modification which selectively reduces activity at the GLP-1 peptide, e.g., a modification of the Thr at position 7, such as a substitution of the Thr at position 7 with an amino acid lacking a hydroxyl group, e.g., Abu or Ile; deleting amino acids C-terminal to the amino acid at position 27 (e.g., deleting one or both of the amino acids at positions 28 and 29, yielding a peptide 27 or 28 amino acids in length);

[0462] (j) C-terminal extensions as described herein;

[0463] (k) homodimerization or heterodimerization as described herein; and combinations of the (a) through (k).

[0464] In some embodiments, exemplary modifications of the Class 1 glucagon related peptide include at least one amino acid modification selected from Group A and one or more amino acid modifications selected from Group B and/or Group C, wherein Group A is:

[0465] substitution of Asn at position 28 with a charged amino acid;

[0466] substitution of Asn at position 28 with a charged amino acid selected from the group consisting of Lys, Arg, His, Asp, Glu, cysteic acid, and homocysteic acid;

[0467] substitution at position 28 with Asn, Asp, or Glu;

[0468] substitution at position 28 with Asp;

[0469] substitution at position 28 with Glu;

[0470] substitution of Thr at position 29 with a charged amino acid;

[0471] substitution of Thr at position 29 with a charged amino acid selected from the group consisting of Lys, Arg, His, Asp, Glu, cysteic acid, and homocysteic acid;

[0472] substitution at position 29 with Asp, Glu, or Lys;

[0473] substitution at position 29 with Glu;

[0474] insertion of 1-3 charged amino acids after position 29;

[0475] insertion after position 29 of Glu or Lys;

[0476] insertion after position 29 of Gly-Lys or Lys-Lys;

[0477] or combinations thereof;

wherein Group B is:

[0478] substitution of Asp at position 15 with Glu;

[0479] substitution of Ser at position 16 with Thr or AIB;

and wherein Group C is:

[0480] substitution of His at position 1 with a non-native amino acid that reduces susceptibility of the glucagon related peptide to cleavage by dipeptidyl peptidase IV (DPP-IV),

[0481] substitution of Ser at position 2 with a non-native amino acid that reduces susceptibility of the glucagon related peptide to cleavage by dipeptidyl peptidase IV (DPP-IV),

[0482] substitution of Lys at position 12 with Arg;

[0483] substitution of Gln at position 20 with Ser, Thr, Ala or AIB;

[0484] substitution of Asp at position 21 with Glu;

[0485] substitution of Gln at position 24 with Ser, Thr, Ala or AIB;

[0486] substitution of Met at position 27 with Leu or Nle;

[0487] deletion of amino acids at positions 27-29;

[0488] deletion of amino acids at positions 28-29;

[0489] deletion of the amino acid at positions 29;

[0490] or combinations thereof.

[0491] In exemplary embodiments, Lys at position 12 is substituted with Arg. In other exemplary embodiments amino acids at positions 29 and/or 28, and optionally at position 27, are deleted.

[0492] In some specific embodiments, the glucagon related peptide comprises (a) an amino acid modification at position 1 and/or 2 that confers DPP-IV resistance, e.g., substitution with DMIA at position 1, or AIB at position 2, (b) an intramolecular bridge within positions 12-29, e.g. at positions 16 and 20, or one or more substitutions of the amino acids at positions 16, 20, 21, and 24 with an α,α disubstituted amino acid, optionally (c) linked to a hydrophilic moiety such as PEG, e.g., through Cys at position 24, 29 or at the C-terminal amino acid, optionally (d) an amino acid modification at position 27 that substitutes Met with, e.g., Nle, optionally (e) amino acid modifications at positions 20, 21 and 24 that reduce degradation, and optionally (f) linked to SEQ ID NO: 820. When the glucagon related peptide is linked to SEQ ID NO: 820, the amino acid at position 29 in certain embodiments is Thr or Gly. In other specific embodiments, the glucagon related peptide comprises (a) Asp28Glu29, or Glu28Glu29, or Glu29Glu30, or Glu28Glu30 or Asp28Glu30, and optionally (b) an amino acid modification at position 16 that substitutes Ser with, e.g. Thr or AIB, and optionally (c) an amino acid modification at position 27 that substitutes Met with, e.g., Nle, and optionally (d) amino acid modifications at positions 20, 21 and 24 that reduce degradation. In a specific embodiment, the glucagon related peptide is T16, A20, E21, A24, Nle27, D28, E29.

[0493] In some embodiments, the Class 1 glucagon related peptide comprises the amino acid sequence:

X1-X2-Gln-Gly-Thr-Phe-Thr-Ser-Asp-Tyr-Ser-Lys-Tyr-Leu-Asp-Ser-Arg-Arg-Ala-Gln-Asp-Phe-Val-Gln-Trp-Leu-Met-Z (SEQ ID NO: 839) with 1 to 3 amino acid modifications thereto,
wherein X1 and/or X2 is a non-native amino acid that reduces susceptibility of (or increases resistance of) the glucagon related peptide to cleavage by dipeptidyl peptidase IV (DPP-IV), wherein Z is selected from the group consisting of —COOH (the naturally occurring C-terminal carboxylate), -Asn-COOH, Asn-Thr-COOH, and Y—COOH, wherein Y is 1 to 2 amino acids, and wherein an intramolecular bridge, preferably a covalent bond, connects the side chains of an amino acid at position i and an amino acid at position i+4, wherein i is 12, 16, 20 or 24.

[0494] In some embodiments, the intramolecular bridge is a lactam bridge. In some embodiments, the amino acids at positions i and i+4 of SEQ ID NO: 839 are Lys and Glu, e.g., Glu16 and Lys20. In some embodiments, X1 is selected from the group consisting of: D-His, N-methyl-His, alpha-methyl-His, imidazole acetic acid, des-amino-His, hydroxyl-His, acetyl-His, homo-His, and alpha, alpha-dimethyl imidiazole acetic acid (DMIA). In other embodiments, X2 is selected from the group consisting of: D-Ser, D-Ala, Gly, N-methyl-Ser, Val, and alpha, amino isobutyric acid (AIB). In some embodiments, the glucagon related peptide is covalently linked to a hydrophilic moiety at any of amino acid positions 16, 17, 20, 21, 24, 29, 40, within a C-terminal extension, or at the C-terminal amino acid. In exemplary embodiments, this hydrophilic moiety is covalently linked to a Lys, Cys, Orn, homocysteine, or acetyl-phenylalanine residue at any of these positions. Exemplary hydrophilic moieties include polyethylene glycol (PEG), for example, of a molecular weight of about 1,000 Daltons to about 40,000 Daltons, or about 20,000 Daltons to about 40,000 Daltons.

[0495] In other embodiments, the Class I glucagon related peptide comprises the amino acid sequence: X1-X2-Gln-Gly-Thr-Phe-Thr-Ser-Asp-Tyr-Ser-Lys-Tyr-Leu-Asp-Ser-Arg-Arg-Ala-Gln-Asp-Phe-Val-Gln-Trp-Leu-Met-Z (SEQ ID NO: 839), wherein X1 and/or X2 is a non-native amino acid that reduces susceptibility of (or increases resistance of) the glucagon related peptide to cleavage by dipeptidyl peptidase IV (DPP-IV), wherein one, two, three, four or more of positions 16, 20, 21, and 24 of the glucagon related peptide is substituted with an α,α-disubstituted amino acid, and wherein Z is selected from the group consisting of —COOH (the naturally occurring C-terminal carboxylate), -Asn-COOH, Asn-Thr-COOH, and Y—COOH, wherein Y is 1 to 2 amino acids.

[0496] Exemplary further amino acid modifications to the foregoing Class 1 glucagon related peptides or analogs include substitution of Thr at position 7 with an amino acid lacking a hydroxyl group, e.g., aminobutyric acid (Abu), Ile, optionally, in combination with substitution or addition of an amino acid comprising a side chain covalently attached (optionally, through a spacer) to an acyl or alkyl group, which acyl or alkyl group is non-native to a naturally-occurring amino acid, substitution of Lys at position 12 with Arg; substitution of Asp at position 15 with Glu; substitution of Ser at position 16 with Thr or AIB; substitution of Gln at position 20 with Ser, Thr, Ala or AIB; substitution of Asp at position 21 with Glu; substitution of Gln at position 24 with Ser, Thr, Ala or AIB; substitution of Met at position 27 with Leu or Nle; substitution of Asn at position 28 with a charged amino acid; substitution of Asn at position 28 with a charged amino acid selected from the group consisting of Lys, Arg, His, Asp, Glu, cysteic acid, and homocysteic acid; substitution at position 28 with Asn, Asp, or Glu; substitution at position 28 with Asp; substitution at position 28 with Glu; substitution of Thr at position 29 with a charged amino acid; substitution of Thr at position 29 with a charged amino acid selected from the group consisting of Lys, Arg, His, Asp, Glu, cysteic acid, and homocysteic acid; substitution at position 29 with Asp, Glu, or Lys; substitution at position 29 with Glu; insertion of 1-3 charged amino acids after position 29; insertion at position 30 (i.e., after position 29) of Glu or Lys; optionally with insertion at position 31 of Lys; addition of SEQ ID NO: 820 to the C-terminus, optionally, wherein the amino acid at position 29 is Thr or Gly; substitution or addition of an amino acid covalently attached to a hydrophilic moiety; or a combination thereof.

[0497] Any of the modifications described above in reference to Class 1 glucagon agonists which increase glucagon receptor activity, retain partial glucagon receptor activity, improve solubility, increase stability, or reduce degradation can be applied to Class 1 glucagon related peptides individually or in combination.

### Examples of Embodiments of Class 1 Glucagon Related Peptides

[0498] In accordance with some embodiments the native glucagon peptide of SEQ ID NO: 801 is modified by the substitution of the native amino acid at position 28 and/or 29 with a negatively charged amino acid (e.g., aspartic acid or glutamic acid) and optionally the addition of a negatively charged amino acid (e.g., aspartic acid or glutamic acid) to the carboxy terminus of the peptide. In an alternative embodiment the native glucagon peptide of SEQ ID NO: 801 is modified by the substitution of the native amino acid at position 29 with a positively charged amino acid (e.g., lysine, arginine or histidine) and optionally the addition of one or two positively charged amino acid (e.g., lysine, arginine or histidine) on the carboxy terminus of the peptide. In accordance with some embodiments a glucagon analog having improved solubility and stability is provided wherein the analog comprises the amino acid sequence of SEQ ID NO: 834 with the proviso that at least one amino acids at position, 28, or 29 is substituted with an acidic amino acid and/or an additional acidic amino acid is added at the carboxy terminus of SEQ ID NO: 834. In some embodiments the acidic amino acids are independently selected from the group consisting of Asp, Glu, cysteic acid and homocysteic acid.

[0499] In accordance with some embodiments a glucagon agonist having improved solubility and stability is provided wherein the agonist comprises the amino acid sequence of SEQ ID NO: 833, wherein at least one of the amino acids at positions 27, 28 or 29 is substituted with a non-native amino acid residue (i.e. at least one amino acid present at position 27, 28 or 29 of the analog is an acid amino acid different from the amino acid present at the corresponding position in SEQ ID NO: 801). In accordance with some embodiments a glucagon agonist is provided comprising the sequence of SEQ ID NO: 833 with the proviso that when the amino acid at position 28 is asparagine and the amino acid at position 29 is threonine, the peptide further comprises one to two amino acids, independently selected from the group consisting of Lys, Arg, His, Asp or Glu, added to the carboxy terminus of the glucagon related peptide. In accordance with some embodiments the methionine residue present at position 27 of the native peptide is changed to leucine or norleucine to prevent oxidative degradation of the peptide.

[0500] In some embodiments a glucagon analog of SEQ ID NO: 833 is provided wherein 1 to 6 amino acids, selected from positions 1, 2, 5, 7, 10, 11, 12, 13, 14, 16, 17, 18, 19, 20, 21 or 24 of the analog differ from the corresponding amino acid of SEQ ID NO: 801. In accordance with another embodiment a glucagon analog of SEQ ID NO: 833 is provided wherein 1 to 3 amino acids selected from positions 1, 2, 5, 7, 10, 11, 12, 13, 14, 16, 17, 18, 19, 20, 21 or 24 of the analog differ from the corresponding amino acid of SEQ ID NO: 801. In another embodiment, a glucagon analog of SEQ ID NO: 807, SEQ ID NO: 808 or SEQ ID NO: 834 is provided wherein 1 to 2 amino acids selected from positions 1, 2, 5, 7, 10, 11, 12, 13, 14, 16, 17, 18, 19, 20, 21 or 24 of the analog differ from the corresponding amino acid of SEQ ID NO: 801, and in a further embodiment those one to two differing amino acids represent conservative amino acid substitutions relative to the amino acid present in the native sequence (SEQ ID NO: 801). In some embodiments a glucagon related peptide of SEQ ID NO: 811 or SEQ ID NO: 813 is provided wherein the glucagon related peptide further comprises one, two or three amino acid substitutions at positions selected from positions 2, 5, 7, 10, 11, 12, 13, 14, 16, 17, 18, 19, 20, 21, 24, 27 or 29. In some embodiments the substitutions at positions 2, 5, 7, 10, 11, 12, 13, 14, 16, 17, 18, 19, 20, 27 or 29 are conservative amino acid substitutions.

[0501] In some embodiments a glucagon agonist is provided comprising an analog peptide of SEQ ID NO: 801 wherein the analog differs from SEQ ID NO: 801 by having an amino acid other than serine at position 2 and by having an acidic amino acid substituted for the native amino acid at position 28 or 29 or an acidic amino acid added to the carboxy terminus of the peptide of SEQ ID NO: 801. In some embodiments the acidic amino acid is aspartic acid or glutamic acid. In some embodiments a glucagon analog of SEQ ID NO: 809, SEQ ID NO: 812, SEQ ID NO: 813 or SEQ ID NO: 832 is provided wherein the analog differs from the parent molecule by a substitution at position 2. More particularly, position 2 of the analog peptide is substituted with an amino acid selected from the group consisting of D-serine, alanine, D-alanine, glycine, n-methyl serine and amino isobutyric acid.

[0502] In another embodiment a glucagon agonist is provided comprising an analog peptide of SEQ ID NO: 801 wherein the analog differs from SEQ ID NO: 801 by having an amino acid other than histidine at position 1 and by having an acidic amino acid substituted for the native amino acid at position 28 or 29 or an acidic amino acid added to the carboxy terminus of the peptide of SEQ ID NO: 801. In some embodiments the acidic amino acid is aspartic acid or glutamic acid. In some embodiments a glucagon analog of SEQ ID NO: 809, SEQ ID NO: 812, SEQ ID NO: 813 or SEQ ID NO: 832 is provided wherein the analog differs from the parent molecule by a substitution at position 1. More particularly, position 1 of the analog peptide is substituted with an amino acid selected from the group consisting of DMIA, D-histidine, desaminohistidine, hydroxyl-histidine, acetyl-histidine and homo-histidine.

[0503] In accordance with some embodiments the modified glucagon related peptide comprises a sequence selected from the group consisting of SEQ ID NO: 809, SEQ ID NO: 812, SEQ ID NO: 813 and SEQ ID NO: 832. In a further embodiment a glucagon related peptide is provided comprising a sequence of SEQ ID NO: 809, SEQ ID NO: 812, SEQ ID NO: 813 or SEQ ID NO: 832 further comprising one to two amino acids, added to the C-terminus of SEQ ID NO: 809, SEQ ID NO: 812, SEQ ID NO: 813 or SEQ ID NO: 832, wherein the additional amino acids are independently selected from the group consisting of Lys, Arg, His, Asp Glu, cysteic acid or homocysteic acid. In some embodiments the additional amino acids added to the carboxy terminus are selected from the group consisting of Lys, Arg, His, Asp or Glu or in a further embodiment the additional amino acids are Asp or Glu.

[0504] In another embodiment the glucagon related peptide comprises the sequence of SEQ ID NO: 7 or a glucagon agonist analog thereof. In some embodiments the peptide comprising a sequence selected from the group consisting of SEQ ID NO: 808, SEQ ID NO: 810, SEQ ID NO: 811, SEQ ID NO: 812 and SEQ ID NO: 813. In another embodiment the peptide comprising a sequence selected from the group consisting of SEQ ID NO: 808, SEQ ID NO: 810 and SEQ ID NO: 811. In some embodiments the glucagon related peptide comprises the sequence of SEQ ID NO: 808, SEQ ID NO: 810 and SEQ ID NO: 811 further comprising an additional amino acid, selected from the group consisting of Asp and Glu, added to the C-terminus of the glucagon related peptide. In some embodiments the glucagon related peptide comprises the sequence of SEQ ID NO: 811 or SEQ ID NO: 813, and in a further embodiment the glucagon related peptide comprises the sequence of SEQ ID NO: 811.

[0505] In accordance with some embodiments a glucagon agonist is provided comprising a modified glucagon related peptide selected from the group consisting of:

[0506] NH₂-His-Ser-Gln-Gly-Thr-Phe-Thr-Ser-Asp-Tyr-Ser-Lys-Tyr-Leu-Xaa-Ser-Arg-Arg-Ala-Gln-Asp-Phe-Val-Gln-Trp-Leu-Xaa-Xaa-Xaa-R (SEQ ID NO: 834),

[0507] NH₂-His-Ser-Gln-Gly-Thr-Phe-Thr-Ser-Asp-Tyr-Ser-Lys-Tyr-Leu-Asp-Ser-Arg-Arg-Ala-Gln-Asp-Phe-Val-Gln-Trp-Leu-Met-Asp-Thr-R (SEQ ID NO: 811) and

[0508] NH₂-His-Ser-Gln-Gly-Thr-Phe-Thr-Ser-Asp-Tyr-Ser-Xaa-Tyr-Leu-Glu-Ser-Arg-Arg-Ala-Gln-Asp-Phe-Val-Gln-Trp-Leu-Met-Asp-Thr-R (SEQ ID NO: 813)

[0509] wherein Xaa at position 15 is Asp, Glu, cysteic acid, homoglutamic acid or homocysteic acid, the Xaa at position 28 is Asn or an acidic amino acid and the Xaa at position 29 is Thr or an acidic amino acid and R is an acidic amino acid, COOH or CONH₂, with the proviso that an acidic acid residue is present at one of positions 28, 29 or 30. In some embodiments R is COOH, and in another embodiment R is CONH₂.

[0510] The present disclosure also encompasses glucagon fusion peptides wherein a second peptide has been fused to the C-terminus of the glucagon related peptide to enhance the stability and solubility of the glucagon related peptide. More particularly, the fusion glucagon related peptide may comprise a glucagon agonist analog comprising a glucagon related peptide NH₂-His-Ser-Gln-Gly-Thr-Phe-Thr-Ser-Asp-Tyr-Ser-Lys-Tyr-Leu-Xaa-Ser-Arg-Arg-Ala-Gln-Asp-Phe-Val-Gln-Trp-Leu-Xaa-Xaa-Xaa-R (SEQ ID NO: 834), wherein R is an acidic amino acid or a bond and an amino acid sequence of SEQ ID NO: 820 (GPSSGAPPPS), SEQ ID NO: 821 (KRNRNNIA) or SEQ ID NO: 822 (KRNR) linked to the carboxy terminal amino acid of the glucagon related peptide. In some embodiments the glucagon related peptide is selected from the group consisting of SEQ ID NO: 833, SEQ ID NO: 807 or SEQ ID NO: 808 further comprising an amino acid sequence of SEQ ID NO: 820 (GPSSGAPPPS), SEQ ID NO: 821 (KRNRNNIA) or SEQ ID NO: 822 (KRNR) linked to the carboxy terminal amino acid of the glucagon related peptide. In some embodiments the glucagon fusion peptide comprises SEQ ID NO: 802, SEQ ID NO: 803, SEQ ID NO: 804, SEQ ID NO: 805 and SEQ ID NO: 806 or a glucagon agonist analog thereof, further comprising an amino acid sequence of SEQ ID NO: 820 (GPSSGAPPPS), SEQ ID NO: 821 (KRNRNNIA) or SEQ ID NO: 822 (KRNR) linked to amino acid 29 of the glucagon related peptide. In accordance with some embodiments the fusion peptide further comprises a PEG chain linked to an amino acid at position 16, 17, 21, 24, 29, within a C-terminal extension, or at the C-terminal amino acid, wherein the PEG chain is selected from the range of 500 to 40,000 Daltons. In some embodiments the amino acid sequence of SEQ ID NO: 820 (GPSSGAPPPS), SEQ ID NO: 821 (KRNRNNIA) or SEQ ID NO: 822 (KRNR) is bound to amino acid 29 of the glucagon related peptide through a peptide bond. In some embodiments the glucagon related peptide portion of the glucagon fusion peptide comprises a sequence selected from the group consisting of SEQ ID NO: 810, SEQ ID NO: 811 and SEQ ID NO: 813. In some embodiments the glucagon related peptide portion of the glucagon fusion peptide comprises the sequence of SEQ ID NO: 811 or SEQ ID NO: 813, wherein a PEG chain is linked at position 21, 24, 29, within a C-terminal extension or at the C-terminal amino acid, respectively.

[0511] In another embodiment the glucagon related peptide sequence of the fusion peptide comprises the sequence of SEQ ID NO: 811, further comprising an amino acid sequence of SEQ ID NO: 820 (GPSSGAPPPS), SEQ ID NO: 821 (KRNRNNIA) or SEQ ID NO: 822 (KRNR) linked to amino acid 29 of the glucagon related peptide. In some embodiments the glucagon fusion peptide comprises a sequence selected from the group consisting of SEQ ID NO: 824, SEQ ID NO: 825 and SEQ ID NO: 826. Typically the fusion peptides of the present invention will have a C-terminal amino acid with the standard carboxylic acid group. However, analogs of those sequences wherein the C-terminal amino acid has an amide substituted for the carboxylic acid are also encompassed as embodiments. In accordance with some embodiments the fusion glucagon related peptide comprises a glucagon agonist analog selected from the group consisting of SEQ ID NO: 810, SEQ ID NO: 811 and SEQ ID NO: 813, further comprising an amino acid sequence of SEQ ID NO: 823 (GPSSGAPPPS-CONH₂) linked to amino acid 29 of the glucagon related peptide.

[0512] The glucagon agonists of the present invention can be further modified to improve the peptide's solubility and stability in aqueous solutions while retaining the biological activity of the glucagon related peptide. In accordance with some embodiments, introduction of hydrophilic groups at one or more positions selected from positions 16, 17, 20, 21, 24 and 29 of the peptide of SEQ ID NO: 811, or a glucagon agonist analog thereof, are anticipated to improve the solubility and stability of the pH stabilize glucagon analog. More particularly, in some embodiments the glucagon related peptide of SEQ ID NO: 810, SEQ ID NO: 811, SEQ ID NO: 813, or SEQ ID NO: 832 is modified to comprise one or more hydrophilic groups covalently linked to the side chains of amino acids present at positions 21 and 24 of the glucagon related peptide.

[0513] In accordance with some embodiments, the glucagon related peptide of SEQ ID NO: 811 is modified to contain one or more amino acid substitution at positions 16, 17, 20, 21, 24 and/or 29, wherein the native amino acid is substituted with an amino acid having a side chain suitable for crosslinking with hydrophilic moieties, including for example, PEG. The native peptide can be substituted with a naturally occurring amino acid or a synthetic (non-naturally occurring) amino acid. Synthetic or non-naturally occurring amino acids refer to amino acids that do not naturally occur in vivo but which, nevertheless, can be incorporated into the peptide structures described herein.

[0514] In some embodiments, a glucagon agonist of SEQ ID NO: 810, SEQ ID NO: 811 or SEQ ID NO: 813 is provided wherein the native glucagon peptide sequence has been modified to contain a naturally occurring or synthetic amino acid in at least one of positions 16, 17, 21, 24, 29, within a C-terminal extension or at the C-terminal amino acid of the native sequence, wherein the amino acid substitute further comprises a hydrophilic moiety. In some embodiments the substitution is at position 21 or 24, and in a further embodiment the hydrophilic moiety is a PEG chain. In some embodiments the glucagon related peptide of SEQ ID NO: 811 is substituted with at least one cysteine residue, wherein the side chain of the cysteine residue is further modified with a thiol reactive reagent, including for example, maleimido, vinyl sulfone, 2-pyridylthio, haloalkyl, and haloacyl. These thiol reactive reagents may contain carboxy, keto, hydroxyl, and ether groups as well as other hydrophilic moieties such as polyethylene glycol units. In an alternative embodiment, the native glucagon peptide is substituted with lysine, and the side chain of the substituting lysine residue is further modified using amine reactive reagents such as active esters (succinimido, anhydride, etc) of carboxylic acids or aldehydes of hydrophilic moieties such as polyethylene glycol. In some embodiments the glucagon related peptide is selected from the group consisting of SEQ ID NO: 814, SEQ ID NO: 815, SEQ ID NO: 816, SEQ ID NO: 817, SEQ ID NO: 818 and SEQ ID NO: 819.

[0515] In accordance with some embodiments the pegylated glucagon related peptide comprises two or more polyethylene glycol chains covalently bound to the glucagon related peptide wherein the total molecular weight of the glucagon chains is about 1,000 to about 5,000 Daltons. In some embodiments the pegylated glucagon agonist comprises a peptide of SEQ ID NO: 806, wherein a PEG chain is covalently linked to the amino acid residue at position 21 and at position 24, and wherein the combined molecular weight of the two PEG chains is about 1,000 to about 5,000 Daltons. In another embodiment the pegylated glucagon agonist comprises a peptide of SEQ ID NO: 806, wherein a PEG chain is covalently linked to the amino acid residue at position 21 and at position 24, and wherein the combined molecular weight of the two PEG chains is about 5,000 to about 20,000 Daltons.

[0516] The polyethylene glycol chain may be in the form of a straight chain or it may be branched. In accordance with some embodiments the polyethylene glycol chain has an average molecular weight selected from the range of about 500 to about 40,000 Daltons. In some embodiments the polyethylene glycol chain has a molecular weight selected from the range of about 500 to about 5,000 Daltons. In another embodiment the polyethylene glycol chain has a molecular weight of about 20,000 to about 40,000 Daltons.

[0517] Any of the glucagon related peptides described above may be further modified to include a covalent or non-covalent intramolecular bridge or an alpha helix-stabilizing amino acid within the C-terminal portion of the glucagon related peptide (amino acid positions 12-29). In accordance with some embodiments, the glucagon related peptide comprises any one or more of the modifications discussed above in addition to an amino acid substitution at positions 16, 20, 21, or 24 (or a combination thereof) with an α,α-disubstituted amino acid, e.g., AIB. In accordance with another embodiment, the glucagon related peptide comprises any one or more modifications discussed above in addition to an intramolecular bridge, e.g., a lactam, between the side chains of the amino acids at positions 16 and 20 of the glucagon related peptide.

[0518] In accordance with some embodiments, the glucagon related peptide comprises the amino acid sequence of SEQ ID NO: 877, wherein the Xaa at position 3 is an amino acid comprising a side chain of Structure I, II, or III:

[chemical structure]

[0519] wherein R¹ is C₀₋₃ alkyl or C₀₋₃ heteroalkyl; R² is NHR⁴ or C₁₋₃ alkyl; R³ is C₁₋₃ alkyl; R⁴ is H or C₁₋₃ alkyl; X is NH, O, or S; and Y is NHR⁴, SR³, or OR³. In some embodiments, X is NH or Y is NHR⁴. In some embodiments, R¹ is C₀₋₂ alkyl or C₁ heteroalkyl. In some embodiments, R² is NHR⁴ or C₁ alkyl. In some embodiments, R⁴ is H or C¹ alkyl. In exemplary embodiments an amino acid comprising a side chain of Structure I is provided wherein, R¹ is CH—S, X is NH, and R² is CH₃ (acetamidomethyl-cysteine, C(Acm)); R¹ is CH₂, X is NH, and R² is CH₃ (acetyldiaminobutanoic acid, Dab(Ac)); R¹ is C₀ alkyl, X is NH, R² is NHR⁴, and R⁴ is H (carbamoyldiaminopropanoic acid, Dap(urea)); or R¹ is CH₂—CH₂, X is NH, and R² is CH₃ (acetylornithine, Orn(Ac)). In exemplary embodiments an amino acid comprising a side chain of Structure II is provided, wherein R¹ is CH₂, Y is NHR⁴, and R⁴ is CH₃ (methylglutamine, Q(Me)); In exemplary embodiments an amino acid comprising a side chain of Structure III is provided wherein, R¹ is CH₂ and R⁴ is H (methionine-sulfoxide, M(O)); In specific embodiments, the amino acid at position 3 is substituted with Dab(Ac). For example, glucagon agonists can comprise the amino acid sequence of SEQ ID NO: 863, SEQ ID NO: 869, SEQ ID NO: 871, SEQ ID NO: 872, SEQ ID NO: 873 and SEQ ID NO: 874.

[0520] In certain embodiments, the glucagon related peptide is an analog of the glucagon related peptide of SEQ ID NO: 877. In specific aspects, the analog comprises any of the amino acid modifications described herein, including, but not limited to: a substitution of Asn at position 28 with a charged amino acid; a substitution of Asn at position 28 with a charged amino acid selected from the group consisting of Lys, Arg, His, Asp, Glu, cysteic acid, and homocysteic acid; a substitution at position 28 with Asn, Asp, or Glu; a substitution at position 28 with Asp; a substitution at position 28 with Glu; a substitution of Thr at position 29 with a charged amino acid; a substitution of Thr at position 29 with a charged amino acid selected from the group consisting of Lys, Arg, His, Asp, Glu, cysteic acid, and homocysteic acid; a substitution at position 29 with Asp, Glu, or Lys; a substitution at position 29 with Glu; a insertion of 1-3 charged amino acids after position 29; an insertion after position 29 of Glu or Lys; an insertion after position 29 of Gly-Lys or Lys-Lys; and a combination thereof.

[0521] In certain embodiments, the analog of the glucagon related peptide of SEQ ID NO: 877 comprises an α,α-disubstituted amino acid, such as AIB, at one, two, three, or all of positions 16, 20, 21, and 24. In certain embodiments, the analog of the glucagon related peptide of SEQ ID NO: 877 comprises one or more of the following: substitution of His at position 1 with a non-native amino acid that reduces susceptibility of the glucagon related peptide to cleavage by dipeptidyl peptidase IV (DPP-IV), substitution of Ser at position 2 with a non-native amino acid that reduces susceptibility of the glucagon related peptide to cleavage by dipeptidyl peptidase IV (DPP-IV), substitution of Thr at position 7 with an amino acid lacking a hydroxyl group, e.g., Abu or Ile; substitution of Tyr at position 10 with Phe or Val; substitution of Lys at position 12 with Arg; substitution of Asp at position 15 with Glu, substitution of Ser at position 16 with Thr or AIB; substitution of Gln at position 20 with Ala or AIB; substitution of Asp at position 21 with Glu; substitution of Gln at position 24 with Ala or AIB; substitution of Met at position 27 with Leu or Nle; deletion of amino acids at positions 27-29; deletion of amino acids at positions 28-29; deletion of the amino acid at positions 29; addition of the amino acid sequence of SEQ ID NO: 820 to the C-terminus, wherein the amino acid at position 29 is Thr or Gly, or a combination thereof.

[0522] In accordance with specific embodiments, the glucagon related peptide comprises the amino acid sequence of any of SEQ ID NOs: 862-867 and 869-874. In certain embodiments, the analog of the glucagon related peptide comprising SEQ ID NO: 877 comprises a hydrophilic moiety, e.g., PEG, covalently linked to the amino acid at any of positions 16, 17, 20, 21, 24, and 29 or at the C-terminal amino acid.

[0523] In certain embodiments, the analog of the glucagon related peptide comprising SEQ ID NO: 877 comprises an amino acid comprising a side chain covalently attached, optionally, through a spacer, to an acyl group or an alkyl group, which acyl group or alkyl group is non-native to a naturally-occurring amino acid. The acyl group in some embodiments is a C4 to C30 fatty acyl group. In other embodiments, the alkyl group is a C4 to C30 alkyl. In specific aspects, the acyl group or alkyl group is covalently attached to the side chain of the amino acid at position 10. In some embodiments, the amino acid at position 7 is Ile or Abu.

[0524] The glucagon agonist may be a peptide comprising the amino acid sequence of any of the SEQ ID NOs: 801-919, optionally with up to 1, 2, 3, 4, or 5 further modifications that retain glucagon agonist activity. In certain embodiments, the glucagon agonist comprises the amino acids of any of SEQ ID NOs: 859-919.

### Class 2 Glucagon Related Peptides

[0525] In certain embodiments, the glucagon related peptide is a Class 2 glucagon related peptide, which is described herein and in International Patent Application No. PCT US2009/47447 (filed on Jun. 16, 2009),U.S. Provisional Application No. 61/090,448, and U.S. Application No. 61/151,349, the contents of which are incorporated by reference in their entirety. The biological sequences referenced in the following section (SEQ ID NOs: 1001-1262) relating to Class 2 glucagon related peptides correspond to SEQ ID NOs: 1-262 in International Patent Application No. PCT US2009/47447.

### Activity

[0526] Native glucagon does not activate the GIP receptor, and normally has about 1% of the activity of native-GLP-1 at the GLP-1 receptor. Modifications to the native glucagon sequence described herein produce Class 2 glucagon related peptides that can exhibit potent glucagon activity equivalent to or better than the activity of native glucagon (SEQ ID NO: 1001), potent GIP activity equivalent to or better than the activity of native GIP (SEQ ID NO: 1004), and/or potent GLP-1 activity equivalent to or better than the activity of native GLP-1. In this regard, the Class 2 glucagon related peptide may be one of a glucagon/GIP co-agonist, glucagon/GIP/GLP-1 tri-agonist, GIP/GLP-1 co-agonist, or a GIP agonist glucagon related peptide, as further described herein.

[0527] In some embodiments, the Class 2 glucagon related peptides described herein exhibit an EC50 for GIP receptor activation activity of about 100 nM or less, or about 75, 50, 25, 10, 8, 6, 5, 4, 3, 2 or 1 nM or less. In some embodiments, the Class 2 glucagon related peptides exhibit an EC50 for glucagon receptor activation of about 100 nM or less, or about 75, 50, 25, 10, 8, 6, 5, 4, 3, 2 or 1 nM or less. In some embodiments, the Class 2 glucagon related peptides exhibit an EC50 for GLP-1 receptor activation of about 100 nM or less, or about 75, 50, 25, 10, 8, 6, 5, 4, 3, 2 or 1 nM or less. Receptor activation can be measured by in vitro assays measuring cAMP induction in HEK293 cells over-expressing the receptor, e.g. assaying HEK293 cells co-transfected with DNA encoding the receptor and a luciferase gene linked to cAMP responsive element as described in Example 7.

[0528] In some embodiments, Class 2 glucagon related peptides exhibit activity at both the glucagon receptor and the GIP receptor (“glucagon/GIP co-agonists”). These Class 2 glucagon related peptides have lost native glucagon's selectivity for glucagon receptor compared to GIP receptor. In some embodiments, the EC50 of the Class 2 glucagon related peptide at the GIP receptor is less than about 50-fold, 40-fold, 30-fold or 20-fold different (higher or lower) from its EC50 at the glucagon receptor. In some embodiments, the GIP potency of the Class 2 glucagon related peptide is less than about 500-, 450-, 400-, 350-, 300-, 250-, 200-, 150-, 100-, 75-, 50-, 25-, 20-, 15-, 10-, or 5-fold different (higher or lower) from its glucagon potency. In some embodiments, the ratio of the EC50 of the Class 2 glucagon related peptide at the GIP receptor divided by the EC50 of the Class 2 glucagon related peptide at the glucagon receptor is less than about 100, 75, 60, 50, 40, 30, 20, 15, 10, or 5. In some embodiments, GLP-1 activity have been significantly reduced or destroyed, e.g., by an amino acid modification at position 7, a deletion of the amino acid(s)C-terminal to the amino acid at position 27 or 28, yielding a 27- or 28-amino acid peptide, or a combination thereof.

[0529] In another aspect, Class 2 glucagon related peptides exhibit activity at the glucagon, GIP and GLP-1 receptors (“glucagon/GIP/GLP-1 tri-agonists”). These Class 2 glucagon related peptides have lost native glucagon's selectivity for the glucagon receptor compared to both the GLP-1 and GIP receptors. In some embodiments, the EC50 of the Class 2 glucagon related peptide at the GIP receptor is less than about 50-fold, 40-fold, 30-fold or 20-fold different (higher or lower) from its respective EC50s at the glucagon and GLP-1 receptors. In some embodiments, the GIP potency of the Class 2 glucagon related peptide is less than about 500-, 450-, 400-, 350-, 300-, 250-, 200-, 150-, 100-, 75-, 50-, 25-, 20-, 15-, 10-, or 5-fold different (higher or lower) from its glucagon and GLP-1 potencies. In some embodiments, the ratio of the EC50 of the tri-agonist at the GIP receptor divided by the EC50 of the tri-agonist at the GLP-1 receptor is less than about 100, 75, 60, 50, 40, 30, 20, 15, 10, or 5.

[0530] In yet another aspect, Class 2 glucagon related peptides exhibit activity at the GLP-1 and GIP receptors, but in which the glucagon activity has been significantly reduced or destroyed (“GIP/GLP-1 co-agonists”), e.g., by an amino acid modification at position 3. For example, substitution at this position with an acidic, basic, or a hydrophobic amino acid (glutamic acid, ornithine, norleucine) reduces glucagon activity. In some embodiments, the EC50 of the glucagon related peptide at the GIP receptor is less than about 50-fold, 40-fold, 30-fold or 20-fold different (higher or lower) from its EC50 at the GLP-1 receptor. In some embodiments, the GIP potency of the Class 2 glucagon related peptide is less than about 25-, 20-, 15-, 10-, or 5-fold different (higher or lower) from its GLP-1 potency. In some embodiments these Class 2 glucagon related peptides have about 10% or less of the activity of native glucagon at the glucagon receptor, e.g. about 1-10%, or about 0.1-10%, or greater than about 0.1% but less than about 10%. In some embodiments, the ratio of the EC50 of the Class 2 glucagon related peptide at the GIP receptor divided by the EC50 of the Class 2 glucagon related peptide at the GLP-1 receptor is less than about 100, 75, 60, 50, 40, 30, 20, 15, 10, or 5, and no less than 1. In some embodiments, the ratio of the GIP potency of the Class 2 glucagon related peptide compared to the GLP-1 potency of the Class 2 glucagon related peptide is less than about 100, 75, 60, 50, 40, 30, 20, 15, 10, or 5, and no less than 1.

[0531] In a further aspect, Class 2 glucagon related peptides exhibit activity at the GIP receptor, in which the glucagon and GLP-1 activity have been significantly reduced or destroyed (“GIP agonist glucagon peptides”), e.g., by amino acid modifications at positions 3 with Glu and 7 with Ile. In some embodiments, these Class 2 glucagon related peptides have about 10% or less of the activity of native glucagon at the glucagon receptor, e.g. about 1-10%, or about 0.1-10%, or greater than about 0.1%, 0.5%, or 1% but less than about 1%, 5%, or 10%. In some embodiments these Class 2 glucagon related peptides also have about 10% or less of the activity of native GLP-1 at the GLP-1 receptor, e.g. about 1-10%, or about 0.1-10%, or greater than about 0.1%, 0.5%, or 1% but less than about 1%, 5%, or 10%.

### Modifications

[0532] The modifications disclosed herein in reference to a Class 2 glucagon related peptide permit the manipulation of glucagon (SEQ ID NO: 1001) to create glucagon related peptides that exhibit increased GIP activity, glucagon activity, and/or GLP-1 activity. Modifications that affect GIP activity

[0533] Enhanced activity at the GIP receptor is provided by an amino acid modification at position 1. For example, His at position 1 is substituted with a large, aromatic amino acid, optionally Tyr, Phe, Trp, amino-Phe, nitro-Phe, chloro-Phe, sulfo-Phe, 4-pyridyl-Ala, methyl-Tyr, or 3-amino Tyr. The combination of Tyr at position 1 with stabilization of the alpha helix within the region corresponding to amino acids 12-29 provided a Class 2 glucagon related peptide that activates the GIP receptor as well as the GLP-1 receptor and the glucagon receptor. The alpha helix structure can be stabilized by, e.g., formation of a covalent or non-covalent intramolecular bridge, or substitution and/or insertion of amino acids around positions 12-29 with an alpha helix-stabilizing amino acid (e.g., an α,α-disubstituted amino acid).

Enhanced activity at the GIP receptor is also provided by amino acid modifications at positions 27 and/or 28, and optionally at position 29. For example, the Met at position 27 is substituted with a large aliphatic amino acid, optionally Leu, the Asn at position 28 is substituted with a small aliphatic amino acid, optionally Ala, and the Thr at position 29 is substituted with a small aliphatic amino acid, optionally Gly. Substitution with LAG at positions 27-29 provides increased GIP activity relative to the native MNT sequence at those positions.

[0534] Enhanced activity at the GIP receptor is also provided by an amino acid modification at position 12. For example, position 12 is substituted with a large, aliphatic, nonpolar amino acid, optionally Ile. Enhanced activity at the GIP receptor is also provided by an amino acid modification at positions 17 and/or 18. For example, position 17 is substituted with a polar residue, optionally Gln, and position 18 is substituted with a small aliphatic amino acid, optionally Ala. A substitution with QA at positions 17 and 18 provides increased GIP activity relative to the native RR sequence at those positions.

[0535] Increased activity at the GIP receptor is provided by modifications that permit formation of an intramolecular bridge between amino acid side chains at positions from 12 to 29. For example, an intramolecular bridge can be formed by a covalent bond between the side chains of two amino acids at positions i and i+4 or between positions j and j+3, or between positions k and k+7. In exemplary embodiments, the bridge is between positions 12 and 16, 16 and 20, 20 and 24, 24 and 28, or 17 and 20. In other embodiments, non-covalent interactions such as salt bridges can be formed between positively and negatively charged amino acids at these positions.

[0536] Any of the modifications described above which increase GIP receptor activity can be applied individually or in combination. Combinations of the modifications that increase GIP receptor activity generally provide higher GIP activity than any of such modifications taken alone.

Modifications that Affect Glucagon Activity

[0537] In some embodiments, enhanced glucagon potency is provided by an amino acid modification at position 16 of native glucagon (SEQ ID NO: 1001). By way of nonlimiting example, such enhanced potency can be provided by substituting the naturally occurring serine at position 16 with glutamic acid or with another negatively charged amino acid having a side chain with a length of 4 atoms, or alternatively with any one of glutamine, homoglutamic acid, or homocysteic acid, or a charged amino acid having a side chain containing at least one heteroatom, (e.g. N, O, S, P) and with a side chain length of about 4 (or 3-5) atoms. In some embodiments the glucagon related peptide retains its original selectivity for the glucagon receptor relative to the GLP-1 receptors.

[0538] Glucagon receptor activity can be reduced by an amino acid modification at position 3, e.g. substitution of the naturally occurring glutamine at position 3, with an acidic, basic, or a hydrophobic amino acid. For example substitution at position 3 with glutamic acid, ornithine, or norleucine substantially reduces or destroys glucagon receptor activity.

[0539] Maintained or enhanced activity at the glucagon receptor may be achieved by modifying the Gln at position 3 with a glutamine analog, as described herein. For example, glucagon agonists can comprise the amino acid sequence of any of SEQ ID NOs: 1243-1248, 1250, 1251, and 1253-1256.

[0540] Restoration of glucagon activity which has been reduced by amino acid modifications at positions 1 and 2 is provided by modifications that that stabilize the alpha helix structure of the C-terminal portion (amino acids 12-29) of the glucagon related peptide or analog thereof. For example, an intramolecular bridge can be formed by a covalent bond between the side chains of two amino acids at positions i and i+4 or between positions j and j+3, or between positions k and k+7. In other embodiments, non-covalent interactions such as salt bridges can be formed between positively and negatively charged amino acids at these positions. In yet other embodiments, one or more α,α-disubstituted amino acids are inserted or substituted into this C-terminal portion (amino acids 12-29) at positions that retain the desired activity. For example, one, two, three or all of positions 16, 20, 21 or 24 are substituted with an α,α-disubstituted amino acid, e.g., AIB.

Modifications that Affect GLP-1 Activity

[0541] Enhanced activity at the GLP-1 receptor is provided by replacing the carboxylic acid of the C-terminal amino acid with a charge-neutral group, such as an amide or ester. Enhanced activity at the GLP-1 receptor is also provided by stabilizing the alpha-helix structure in the C-terminal portion of glucagon (around amino acids 12-29), e.g., through formation of an intramolecular bridge between the side chains of two amino acids, or substitution and/or insertion of amino acids around positions 12-29 with an alpha helix-stabilizing amino acid (e.g., an α,α-disubstituted amino acid), as further described herein. In exemplary embodiments, the side chains of the amino acid pairs 12 and 16, 13 and 17, 16 and 20, 17 and 21, 20 and 24 or 24 and 28 (amino acid pairs in which i=12, 16, 20, or 24) are linked to one another and thus stabilize the glucagon alpha helix. In some embodiments, the bridge or linker is about 8 (or about 7-9) atoms in length, particularly when the bridge is between positions i and i+4. In some embodiments, the bridge or linker is about 6 (or about 5-7) atoms in length, particularly when the bridge is between positions j and j+3.

[0542] In some embodiments, intramolecular bridges are formed by (a) substituting the naturally occurring serine at position 16 with glutamic acid or with another negatively charged amino acid having a side chain with a length of 4 atoms, or alternatively with any one of glutamine, homoglutamic acid, or homocysteic acid, or a charged amino acid having a side chain containing at least one heteroatom, (e.g. N, O, S, P) and with a side chain length of about 4 (or 3-5) atoms, and (b) substituting the naturally occurring glutamine at position 20 with another hydrophilic amino acid having a side chain that is either charged or has an ability to hydrogen-bond, and is at least about 5 (or about 4-6) atoms in length, for example, lysine, citrulline, arginine, or ornithine. The side chains of such amino acids at positions 16 and 20 can form a salt bridge or can be covalently linked. In some embodiments the two amino acids are bound to one another to form a lactam ring.

[0543] In some embodiments, stabilization of the alpha helix structure in the C-terminal portion of the glucagon related peptide is achieved through the formation of an intramolecular bridge other than a lactam bridge. For example, suitable covalent bonding methods include any one or more of olefin metathesis, lanthionine-based cyclization, disulfide bridge or modified sulfur-containing bridge formation, the use of a, w-diaminoalkane tethers, the formation of metal-atom bridges, and other means of peptide cyclization are used to stabilize the alpha helix.

In yet other embodiments, one or more α,α-disubstituted amino acids are inserted or substituted into this C-terminal portion (amino acids 12-29) at positions that retain the desired activity. For example, one, two, three or all of positions 16, 20, 21 or 24 are substituted with an α,α-disubstituted amino acid, e.g., AIB. Increased activity at the GLP-1 receptor is provided by an amino acid modification at position 20 as described herein. Increased activity at the GLP-1 receptor is also provided by adding GPSSGAPPPS (SEQ ID NO: 1095) or XGPSSGAPPPS (SEQ ID NO: 1096) to the C-terminus. GLP-1 activity in such analogs can be further increased by modifying the amino acid at position 18, 28 or 29, or at position 18 and 29, as described herein. A further modest increase in GLP-1 potency is provided by modifying the amino acid at position 10 to be a large, aromatic amino acid residue, optionally Trp. Potency at the GLP-1 receptor can be further enhanced by an alanine substitution for the native arginine at position 18.

[0544] Reduced activity at the GLP-1 receptor is provided, e.g., by an amino acid modification at position 7 as described herein.

[0545] Any of the modifications described above in reference to a Class 2 glucagon related peptide which increase GLP-1 receptor activity can be applied individually or in combination. Combinations of the modifications that increase GLP-1 receptor activity generally provide higher GLP-1 activity than any of such modifications taken alone. For example, the invention provides glucagon related peptides that comprise modifications at position 16, at position 20, and at the C-terminal carboxylic acid group, optionally with a covalent bond between the amino acids at positions 16 and 20; glucagon related peptides that comprise modifications at position 16 and at the C-terminal carboxylic acid group; glucagon related peptides that comprise modifications at positions 16 and 20, optionally with a covalent bond between the amino acids at positions 16 and 20; and glucagon related peptides that comprise modifications at position 20 and at the C-terminal carboxylic acid group.

Modifications that Improve DPP-IV Resistance

[0546] Modifications at position 1 and/or 2 can increase the peptide's resistance to dipeptidyl peptidase IV (DPP IV) cleavage. For example, position 1 and/or position 2 may be substituted with a DPP-IV resistant amino acid as described herein. In some embodiments, the amino acid at position 2 is substituted with N-methyl alanine.

[0547] It was observed that modifications at position 2 (e.g. AIB at position 2) and in some cases modifications at position 1 (e.g., DMIA at position 1) may reduce glucagon activity, sometimes significantly; surprisingly, this reduction in glucagon activity can be restored by stabilizing the alpha-helix structure in the C-terminal portion of glucagon (around amino acids 12-29), e.g., through formation of a covalent bond between the side chains of two amino acids, as described herein. In some embodiments, the covalent bond is between amino acids at positions “i” and “i+4”, or positions “j” and “j+3”, e.g., between positions 12 and 16, 16 and 20, 20 and 24, 24 and 28, or 17 and 20. In exemplary embodiments, this covalent bond is a lactam bridge between a glutamic acid at position 16 and a lysine at position 20. In some embodiments, this covalent bond is an intramolecular bridge other than a lactam bridge, as described herein.

Modifications that Reduce Degradation

[0548] In yet further exemplary embodiments, any of the Class 2 glucagon related peptides can be further modified to improve stability by modifying the amino acid at position 15 and/or 16 of SEQ ID NO: 1001 to reduce degradation of the peptide over time, especially in acidic or alkaline buffers. Such modifications reduce cleavage of the Asp15-Ser16 peptide bond. In exemplary embodiments, the amino acid modification at position 15 is a deletion or substitution of Asp with glutamic acid, homoglutamic acid, cysteic acid or homocysteic acid. In other exemplary embodiments, the amino acid modification at position 16 is a deletion or substitution of Ser with Thr or AIB. In other exemplary embodiments, Ser at position 16 is substituted with glutamic acid or with another negatively charged amino acid having a side chain with a length of 4 atoms, or alternatively with any one of glutamine, homoglutamic acid, or homocysteic acid.

[0549] In some embodiments, the methionine residue present at position 27 of the native peptide is modified, e.g. by deletion or substitution. Such modifications may prevent oxidative degradation of the peptide. In some embodiments, the Met at position 27 is substituted with leucine, isoleucine or norleucine. In some specific embodiments, Met at position 27 is substituted with leucine or norleucine.

[0550] In some embodiments, the Gln at position 20 and/or 24 is modified, e.g. by deletion or substitution. Such modifications can reduce degradation that occurs through deamidation of Gln. In some embodiments, the Gln at position 20 and/or 24 is substituted with Ser, Thr, Ala or AIB. In some embodiments the Gln at position 20 and/or 24 is substituted with Lys, Arg, Orn, or Citrulline.

[0551] In some embodiments, the Asp at position 21 is modified, e.g. by deletion or substitution. Such modifications can reduce degradation that occurs through dehydration of Asp to form a cyclic succinimide intermediate followed by isomerization to iso-aspartate. In some embodiments, position 21 is substituted with Glu, homoglutamic acid or homocysteic acid. In some specific embodiments, position 21 is substituted with Glu.

### Stabilization of the Alpha Helix Structure

[0552] Stabilization of the alpha-helix structure in the C-terminal portion of the Class 2 glucagon related peptide (around amino acids 12-29) provides enhanced GLP-1 and/or GIP activity and restores glucagon activity which has been reduced by amino acid modifications at positions 1 and/or 2. The alpha helix structure can be stabilized by, e.g., formation of a covalent or non-covalent intramolecular bridge, or substitution and/or insertion of amino acids around positions 12-29 with an alpha helix-stabilizing amino acid (e.g., an α,α-disubstituted amino acid). Stabilization of the alpha-helix structure of a GIP agonist may be accomplished as described herein.

### Exemplary Embodiments

[0553] In accordance with some embodiments of the invention, the analog of glucagon (SEQ ID NO: 1001) having GIP agonist activity comprises SEQ ID NO: 1001 with (a) an amino acid modification at position 1 that confers GIP agonist activity, (b) a modification which stabilizes the alpha helix structure of the C-terminal portion (amino acids 12-29) of the analog, and (c) optionally, 1 to 10 (e.g., 1, 2, 3, 4, 5, 6, 7, 8, 9, 10) further amino acid modifications. In some embodiments, the analog exhibits at least about 1% activity of native GIP at the GIP receptor or any other activity level at the GIP receptor described herein.

[0554] In certain embodiments, the modification which stabilizes the alpha helix structure is one which provides or introduces an intramolecular bridge, including, for example, a covalent intramolecular bridge, such as any of those described herein. The covalent intramolecular bridge in some embodiments is a lactam bridge. The lactam bridge of the analog of these embodiments can be a lactam bridge as described herein. See, e.g., the teachings of lactam bridges under the section “Stabilization of the Alpha Helix Structure.” For example, the lactam bridge may be one which is between the side chains of amino acids at positions i and i+4 or between the side chains of amino acids at positions j and j+3, wherein i is 12, 13, 16, 17, 20 or 24, and wherein j is 17. In certain embodiments, the lactam bridge can be between the amino acids at positions 16 and 20, wherein one of the amino acids at positions 16 and 20 is substituted with Glu and the other of the amino acids at positions 16 and 20 is substituted with Lys.

[0555] In alternative embodiments, the modification which stabilizes the alpha helix structure is the introduction of one, two, three, or four α,α-disubstituted amino acids at position(s) 16, 20, 21, and 24 of the analog. In some embodiments, the α,α-disubstituted amino acid is AIB. In certain aspects, the α,α-disubstituted amino acid (e.g., AIB) is at position 20 and the amino acid at position 16 is substituted with a positive-charged amino acid, such as, for example, an amino acid of Formula IV, which is described herein. The amino acid of Formula IV may be homoLys, Lys, Orn, or 2,4-diaminobutyric acid (Dab).

[0556] In specific aspects of the invention, the amino acid modification at position 1 is a substitution of His with an amino acid lacking an imidazole side chain, e.g. a large, aromatic amino acid (e.g., Tyr).

[0557] In certain aspects, the analog of glucagon comprises amino acid modifications at one, two or all of positions 27, 28 and 29. For example, the Met at position 27 can be substituted with a large aliphatic amino acid, optionally Leu, the Asn at position 28 can be substituted with a small aliphatic amino acid, optionally Ala, the Thr at position 29 can be substituted with a small aliphatic amino acid, optionally Gly, or a combination of two or three of the foregoing. In specific embodiments, the analog of glucagon comprises Leu at position 27, Ala at position 28, and Gly or Thr at position 29.

[0558] In certain embodiments of the invention, the analog of glucagon comprises an extension of 1 to 21 amino acids C-terminal to the amino acid at position 29. The extension can comprise the amino acid sequence of SEQ ID NO: 1095 or 1096, for instance. Additionally or alternatively, the analog of glucagon can comprise an extension of which 1-6 amino acids of the extension are positive-charged amino acids. The positive-charged amino acids may be amino acids of Formula IV, including, but not limited to Lys, homoLys, Orn, and Dab.

[0559] The analog of glucagon in some embodiments is acylated or alkylated as described herein. For instance, the acyl or alkyl group may be attached to the analog of glucagon, with or without a spacer, at position 10 or 40 of the analog, as further described herein. The analog may additionally or alternatively be modified to comprise a hydrophilic moiety as further described herein. Furthermore, in some embodiments, the analog comprises any one or a combination of the following modifications:
[0560] (a) Ser at position 2 substituted with D-Ser, Ala, D-Ala, Gly, N-methyl-Ser, AIB, Val, or α-amino-N-butyric acid;
[0561] (b) Tyr at position 10 substituted with Trp, Lys, Orn, Glu, Phe, or Val:
[0562] (c) Linkage of an acyl group to a Lys at position 10;
[0563] (d) Lys at position 12 substituted with Arg or Ile;
[0564] (e) Ser at position 16 substituted with Glu, Gln, homoglutamic acid, homocysteic acid, Thr, Gly, or AIB;
[0565] (f) Arg at position 17 substituted with Gln;
[0566] (g) Arg at position 18 substituted with Ala, Ser, Thr, or Gly;
[0567] (h) Gln at position 20 substituted with Ser, Thr, Ala, Lys, Citrulline, Arg, Orn, or AIB;
[0568] (i) Asp at position 21 substituted with Glu, homoglutamic acid, homocysteic acid;
[0569] (j) Val at position 23 substituted with Ile;
[0570] (k) Gln at position 24 substituted with Asn, Ser, Thr, Ala, or AIB;
[0571] (l) and a conservative substitution at any of positions 2 5, 9, 10, 11, 12. 13, 14, 15, 16, 8 19 20, 21. 24, 27, 28, and 29.

[0572] In exemplary embodiments, the analog of glucagon (SEQ ID NO: 1001) having GIP agonist activity comprises the following modifications:
[0573] (a) an amino acid modification at position 1 that confers GIP agonist activity,
[0574] (b) a lactam bridge between the side chains of amino acids at positions i and i+4 or between the side chains of amino acids at positions j and j+3, wherein i is 12, 13, 16, 17, 20 or 24, and wherein j is 17,
[0575] (c) amino acid modifications at one, two or all of positions 27, 28 and 29, e.g., amino acid modifications at position 27 and/or 28, and
[0576] (d) 1-9 or 1-6 further amino acid modifications, e.g. 1, 2, 3, 4, 5, 6, 7, 8 or 9 further amino acid modifications,
   and the EC50 of the analog for GIP receptor activation is about 10 nM or less.

[0577] The lactam bridge of the analog of these embodiments can be a lactam bridge as described herein. For example, the lactam bridge can be between the amino acids at positions 16 and 20, wherein one of the amino acids at positions 16 and 20 is substituted with Glu and the other of the amino acids at positions 16 and 20 is substituted with Lys. In accordance with these embodiments, the analog can comprise, for example, the amino acid sequence of any of SEQ ID NOs: 1005-1094.

[0578] In other exemplary embodiments, the analog of glucagon (SEQ ID NO: 1001) having GIP agonist activity comprises the following modifications:
[0579] (a) an amino acid modification at position 1 that confers GIP agonist activity,
[0580] (b) one, two, three, or all of the amino acids at positions 16, 20, 21, and 24 of the analog is substituted with an α,α-disubstituted amino acid,
[0581] (c) amino acid modifications at one, two or all of positions 27, 28 and 29, e.g., amino acid modifications at position 27 and/or 28, and
[0582] (d) 1-9 or 1-6 further amino acid modifications, e.g. 1, 2, 3, 4, 5, 6, 7, 8 or 9 further amino acid modifications,
   and the EC50 of the analog for GIP receptor activation is about 10 nM or less.

[0583] The α,α-disubstituted amino acid of the analog of these embodiments can be any α,α-disubstituted amino acid, including, but not limited to, amino iso-butyric acid (AIB), an amino acid disubstituted with the same or a different group selected from methyl, ethyl, propyl, and n-butyl, or with a cyclooctane or cycloheptane (e.g., 1-aminocyclooctane-1-carboxylic acid). In certain embodiments, the α,α-disubstituted amino acid is AIB. In certain embodiments, the amino acid at position 20 is substituted with an α,α-disubstituted amino acid, e.g., AIB. In accordance with these embodiments, the analog can comprise, for example, the amino acid sequence of any of SEQ ID NOs: 1099-1141, 1144-1164, 1166-1169, and 1173-1178.

[0584] In yet other exemplary embodiments, the analog of glucagon (SEQ ID NO: 1001) having GIP agonist activity comprises the following modifications:
[0585] (a) an amino acid modification at position 1 that confers GIP agonist activity,
[0586] (b) an amino acid substitution of Ser at position 16 with an amino acid of Formula IV:

[chemical structure]

[0587] wherein n is 1 to 16, or 1 to 10, or 1 to 7, or 1 to 6, or 2 to 6, each of R₁ and R₂ is independently selected from the group consisting of H, C₁-C₁₈ alkyl, (C₁-C₁₈ alkyl)OH, (C₁-C₁₈ alkyl)NH₂, (C₁-C₁₈ alkyl)SH, (C₀-C₄ alkyl)(C₃-C₆)cycloalkyl, (C₀-C₄ alkyl)(C₂-C₅ heterocyclic), (C₀-C₄ alkyl)(C₆-C₁₀ aryl)R₇, and (C₁-C₄ alkyl)(C₃-C₉ heteroaryl), wherein R₇ is H or OH, and the side chain of the amino acid of Formula IV comprises a free amino group,
[0588] (c) an amino acid substitution of the Gln at position 20 with an alpha, alpha-disubstituted amino acid,
[0589] (d) amino acid modifications at one, two or all of positions 27, 28 and 29, e.g., amino acid modifications at position 27 and/or 28, and
[0590] (e) 1-9 or 1-6 further amino acid modifications, e.g. 1, 2, 3, 4, 5, 6, 7, 8 or 9 further amino acid modifications,
   and the EC50 of the analog for GIP receptor activation is about 10 nM or less.

[0591] The amino acid of Formula IV of the analog of these embodiments may be any amino acid, such as, for example, the amino acid of Formula IV, wherein n is 1, 2, 3, 4, 5, 6, 7, 8, 9, 10, 11, 12, 13, 14, 15, or 16. In certain embodiments, n is 2, 3, 4, or 5, in which case, the amino acid is Dab, Orn, Lys, or homoLys respectively.

[0592] The alpha, alpha-disubstituted amino acid of the analog of these embodiments may be any alpha, alpha-disubstituted amino acid, including, but not limited to, amino iso-butyric acid (AIB), an amino acid disubstituted with the same or a different group selected from methyl, ethyl, propyl, and n-butyl, or with a cyclooctane or cycloheptane (e.g., 1-aminocyclooctane-1-carboxylic acid). In certain embodiments, the alpha, alpha-disubstituted amino acid is AIB. In accordance with these embodiments, the analog can comprise, for example, the amino acid sequence of any of SEQ ID NOs: 1099-1165.

[0593] In yet other exemplary embodiments, the analog of glucagon (SEQ ID NO: 1001) having GIP agonist activity comprises:
[0594] (a) an amino acid modification at position 1 that confers GIP agonist activity, and
[0595] (b) an extension of about 1 to about 21 amino acids C-terminal to the amino acid at position 29, wherein at least one of the amino acids of the extension is acylated or alkylated,
   wherein the EC50 of the analog for GIP receptor activation is about 10 nM or less.

[0596] In some embodiments, the acylated or alkylated amino acid is an amino acid of Formula I, II, or III. In more specific embodiments, the amino acid of Formula I is Dab, Orn, Lys, or homoLys. Also, in some embodiments, the extension of about 1 to about 21 amino acids comprises the amino acid sequence of GPSSGAPPPS (SEQ ID NO: 1095) or XGPSSGAPPPS (SEQ ID NO: 1096), wherein X is any amino acid, or GPSSGAPPPK (SEQ ID NO: 1170) or XGPSSGAPPPK (SEQ ID NO: 1171) or XGPSSGAPPPSK (SEQ ID NO: 1172), wherein X is Gly or a small, aliphatic or non-polar or slightly polar amino acid.

[0597] In some embodiments, the about 1 to about 21 amino acids may comprise sequences containing one or more conservative substitutions relative to SEQ ID NO: 1095, 1096, 1170, 1171 or 1172. In some embodiments, the acylated or alkylated amino acid is located at position 37, 38, 39, 40, 41, 42, or 43 of the C-terminally-extended analog. In certain embodiments, the acylated or alkylated amino acid is located at position 40 of the C-terminally extended analog.

[0598] In some embodiments, the analog having GIP agonist activity further comprises amino acid modifications at one, two or all of positions 27, 28 and 29, e.g., amino acid modifications at position 27 and/or 28.

[0599] In any of the above exemplary embodiments, the amino acid modification at position 1 that confers GIP agonist activity can be a substitution of His with an amino acid lacking an imidazole side chain. The amino acid modification at position 1 can, for example, be a substitution of His with a large, aromatic amino acid. In some embodiments, the large, aromatic amino acid is any of those described herein, including, for example, Tyr.

[0600] Also, with regard to the above exemplary embodiments, amino acid modifications at one, two, or all of positions 27, 28, and 29 can be any of the modifications at these positions described herein. For example, the Met at position 27 can be substituted with a large aliphatic amino acid, optionally Leu, the Asn at position 28 can be substituted with a small aliphatic amino acid, optionally Ala, and/or the Thr at position 29 can be substituted with a small aliphatic amino acid, optionally Gly. Alternatively, the analog can comprise such amino acid modifications at position 27 and/or 28.

[0601] The analog of the above exemplary embodiments can further comprise 1-9 or 1-6 further, additional amino acid modifications, e.g. 1, 2, 3, 4, 5, 6, 7, 8 or 9 further amino acid modifications, such as, for example, any of the modifications described herein which increase or decrease the activity at any of the GIP, GLP-1, and glucagon receptors, improve solubility, improve duration of action or half-life in circulation, delay the onset of action, or increase stability. The analog can further comprise, for example, an amino acid modification at position 12, optionally, a substitution with Ile, and/or amino acid modifications at positions 17 and 18, optionally substitution with Q at position 17 and A at position 18, and/or an addition of GPSSGAPPPS (SEQ ID NO: 1095) or XGPSSGAPPPS (SEQ ID NO: 1096), or sequences containing one or more conservative substitutions relative to SEQ ID NO: 1095 or 1096, to the C-terminus. The analog can comprise one or more of the following modifications:
[0602] (i) Ser at position 2 substituted with D-Ser, Ala, D-Ala, Gly, N-methyl-Ser, AIB, Val, or α-amino-N-butyric acid;
[0603] (ii) Tyr at position 10 substituted with Trp, Lys, Orn, Glu, Phe, or Val;
[0604] (iii) Linkage of an acyl group to a Lys at position 10;
[0605] (iv) Lys at position 12 substituted with Arg;
[0606] (v) Ser at position 16 substituted with Glu, Gln, homoglutamic acid, homocysteic acid, Thr, Gly, or AIB;
[0607] (vi) Arg at position 17 substituted with Gln;
[0608] (vii) Arg at position 18 substituted with Ala, Ser, Thr, or Gly;
[0609] (viii) Gln at position 20 substituted with Ala, Ser, Thr, Lys, Citrulline, Arg, Orn, or AIB;
[0610] (ix) Asp at position 21 substituted with Glu, homoglutamic acid, homocysteic acid;
[0611] (x) Val at position 23 substituted with Ile;
[0612] (xi) Gln at position 24 substituted with Asn, Ala, Ser, Thr, or AIB; and
[0613] (xii) a conservative substitution at any of positions 2, 5, 9, 10, 11, 12, 13, 14, 15, 16, 17, 18, 19, 20, 21, 24, 27, 28, and 29.
   The analog in some embodiments comprise a combination of the modifications (i) through (xii). Alternatively or additionally, the analog can comprise an amino acid modification at position 3 (e.g., an amino acid substitution of Gln with Glu), wherein the analog has less than 1% of the activity of glucagon at the glucagon receptor. Alternatively or additionally, the analog can comprise an amino acid modification at position 7 (e.g., an amino acid substitution of Thr with an amino acid lacking a hydroxyl group, e.g., Abu or Ile), wherein the analog has less than about 10% of the activity of GLP-1 at the GLP-1 receptor.

[0614] With regard to the exemplary embodiments, the analog can be covalently linked to a hydrophilic moiety. In some embodiments, the analog is covalently linked to the hydrophilic moiety at any of amino acid positions 16, 17, 20, 21, 24, 29, 40, or the C-terminus. In certain embodiments, the analog comprises a C-terminal extension (e.g., an amino acid sequence of SEQ ID NO: 1095) and an addition of an amino acid comprising the hydrophilic moiety, such that the hydrophilic moiety is covalently linked to the analog at position 40.

[0615] In still further exemplary embodiments, the analog of glucagon having GIP agonist activity comprises the amino acid sequence according to any one of SEQ ID NOs: 1227, 1228, 1229 or 1230 that further comprises the following modifications:
[0616] (a) optionally, an amino acid modification at position 1 that confers GIP agonist activity,
[0617] (b) an extension of about 1 to about 21 amino acids C-terminal to the amino acid at position 29, wherein at least one of the amino acids of the extension is acylated or alkylated, and
[0618] (d) up to 6 further amino acid modifications,
   wherein the EC50 of the analog for GIP receptor activation is about 10 nM or less. In some aspects, the acylated or alkylated amino acid is an amino acid of Formula I, II, or III. In more specific embodiments, the amino acid of Formula I is Dab, Orn, Lys, or homoLys. Also, in some embodiments, the about 1 to about 21 amino acids comprises the amino acid sequence of GPSSGAPPPS (SEQ ID NO: 1095) or XGPSSGAPPPS (SEQ ID NO: 1096), wherein X is any amino acid, or GPSSGAPPPK (SEQ ID NO: 1170) or XGPSSGAPPPK (SEQ ID NO: 1171) or XGPSSGAPPPSK (SEQ ID NO: 1172), wherein Xis Gly or a small, aliphatic or non-polar or slightly polar amino acid. In some embodiments, the about 1 to about 21 amino acids may comprise sequences containing one or more conservative substitutions relative to SEQ ID NO: 1095, 1096, 1170, 1171 or 1172. In some embodiments, the acylated or alkylated amino acid is located at position 37, 38, 39, 40, 41, 42, or 43 of the C-terminally-extended analog. In certain embodiments, the acylated or alkylated amino acid is located at position 40 of the C-terminally extended analog. In any of the above exemplary embodiments, the amino acid at position 1 that confers GIP agonist activity can be an amino acid lacking an imidazole side chain.

[0619] The analog of the above exemplary embodiments can further comprise 1-6 further amino acid modifications, such as, for example, any of the modifications described herein which increase or decrease the activity at any of the GIP, GLP-1, and glucagon receptors, improve solubility, improve duration of action or half-life in circulation, delay the onset of action, or increase stability.

[0620] In certain aspects, glucagon analogs described in the above exemplary embodiment, comprise further amino acid modifications at one, two or all of positions 27, 28 and 29. Modifications at these positions can be any of the modifications described herein relative to these positions. For example, relative to SEQ ID NO: 1227, 1228, 1229 or 1230, position 27 can be substituted with a large aliphatic amino acid (e.g., Leu, Ile or norleucine) or Met, position 28 can be substituted with another small aliphatic amino acid (e.g., Gly or Ala) or Asn, and/or position 29 can be substituted with another small aliphatic amino acid (e.g., Ala or Gly) or Thr. Alternatively, the analog can comprise such amino acid modifications at position 27 and/or 28.

[0621] The analog can further comprise one or more of the following additional modifications:
[0622] (i) the amino acid at position 2 is any one of D-Ser, Ala, D-Ala, Gly, N-methyl-Ser, AIB, Val, or α-amino-N-butyric acid;
[0623] (ii) the amino acid at position 10 is Tyr, Trp, Lys, Orn, Glu, Phe, or Val;
[0624] (iii) linkage of an acyl group to a Lys at position 10;
[0625] (iv) the amino acid at position 12 is Ile, Lys or Arg;
[0626] (v) the amino acid at position 16 is any one of Ser, Glu, Gln, homoglutamic acid, homocysteic acid, Thr, Gly, or AIB;
[0627] (vi) the amino acid at position 17 is Gln or Arg;
[0628] (vii) the amino acid at position 18 is any one of Ala, Arg, Ser, Thr, or Gly;
[0629] (viii) the amino acid at position 20 is any one of Ala, Ser, Thr, Lys, Citrulline, Arg, Orn, or AIB or another alpha, alpha-disubstituted amino acid;
[0630] (ix) the amino acid at position 21 is any one of Glu, Asp, homoglutamic acid, homocysteic acid;
[0631] (x) the amino acid at position 23 is Val or Ile;
[0632] (xi) the amino acid at position 24 is any one of Gln, Asn, Ala, Ser, Thr, or AIB; and
[0633] (xii) one or more conservative substitutions at any of positions 2, 5, 9, 10, 11, 12, 13, 14, 15, 16, 17, 18, 19, 20, 21, 24, 27, 28, and 29.

[0634] The analog in some embodiments comprise a combination of the modifications (i) through (xii). Alternatively or additionally, the analog can comprise an amino acid modification at position 3 (e.g., an amino acid substitution of Gln with Glu), wherein the analog has less than 1% of the activity of glucagon at the glucagon receptor. Alternatively or additionally, the analog can comprise an amino acid modification at position 7 (e.g., an amino acid substitution of Thr with an amino acid lacking a hydroxyl group, e.g., Abu or Ile), wherein the analog has less than about 10% of the activity of GLP-1 at the GLP-1 receptor.

[0635] In the above exemplary embodiments, wherein the analog comprises an acyl or alkyl group, the analog may be attached to the acyl or alkyl group via a spacer, as described herein. The spacer, for example, may be 3 to 10 atoms in length and may be, for instance, an amino acid (e.g., 6-amino hexanoic acid, any amino acid described herein), a dipeptide (e.g., Ala-Ala, βAla-βAla, Leu-Leu, Pro-Pro, γGlu-γGlu), a tripeptide, or a hydrophilic or hydrophobic bifunctional spacer. In certain aspects, the total length of the spacer and the acyl or alkyl group is about 14 to about 28 atoms. In some embodiments, the amino acid spacer is not γ-Glu. In some embodiments, the dipeptide spacer is not γ-Glu-γ-Glu.

[0636] In some very specific embodiments, an analog of the invention comprises an amino acid sequence selected from the group consisting of SEQ ID NOs: 1099-1141, 1144-1164, 1166, 1192-1207, 1209-1221 and 1223 or selected from the group consisting of SEQ ID NOs: 1167-1169, 1173-1178 and 1225.

[0637] In still further exemplary embodiments, the analog of glucagon having GIP agonist activity comprises an acyl or alkyl group (e.g., an acyl or alkyl group which is non-native to a naturally occurring amino acid), wherein the acyl or alkyl group is attached to a spacer, wherein (i) the spacer is attached to the side chain of the amino acid at position 10 of the analog; or (ii) the analog comprises an extension of 1 to 21 amino acids C-terminal to the amino acid at position 29 and the spacer is attached to the side chain of an amino acid corresponding to one of positions 37-43 relative to SEQ ID NO: 1001, wherein the EC50 of the analog for GIP receptor activation is about 10 nM or less.

[0638] In such embodiments, the analog may comprise an amino acid sequence of SEQ ID NO: 1001 with (i) an amino acid modification at position 1 that confers GIP agonist activity, (ii) amino acid modifications at one, two, or all of positions 27, 28, and 29, (iii) at least one of:
[0639] (A) the analog comprises a lactam bridge between the side chains of amino acids at positions i and i+4 or between the side chains of amino acids at positions j and j+3, wherein i is 12, 13, 16, 17, 20 or 24, and wherein j is 17;
[0640] (B) one, two, three, or all of the amino acids at positions 16, 20, 21, and 24 of the analog is substituted with an α,α-disubstituted amino acid; or
[0641] (C) the analog comprises (i) an amino acid substitution of Ser at position 16 with an amino acid of Formula IV:

[chemical structure]

wherein n is 1 to 7, wherein each of R1 and R2 is independently selected from the group consisting of H, C₁-C₁₈ alkyl, (C₁-C₁₈ alkyl)OH, (C₁-C₁₈ alkyl)NH₂, (C₁-C₁₈ alkyl)SH, (C₀-C₄ alkyl)(C₃-C₆)cycloalkyl, (C₀-C₄ alkyl)(C₂-C₅ heterocyclic), (C₀-C₄ alkyl)(C₆-C₁₀ aryl)R₇, and (C₁-C₄ alkyl)(C₃-C₉ heteroaryl), wherein R₇ is H or OH, and the side chain of the amino acid of Formula IV comprises a free amino group; and (ii) an amino acid substitution of the Gln at position 20 with an alpha, alpha-disubstituted amino acid, and (iv) up to 6 further amino acid modifications.

[0642] The alpha, alpha-disubstituted amino acid of the analog of these embodiments may be any alpha, alpha-disubstituted amino acid, including, but not limited to, amino iso-butyric acid (AIB), an amino acid disubstituted with the same or a different group selected from methyl, ethyl, propyl, and n-butyl, or with a cyclooctane or cycloheptane (e.g., 1-aminocyclooctane-1-carboxylic acid). In certain embodiments, the alpha, alpha-disubstituted amino acid is AIB.

[0643] The amino acid of Formula IV of the analog of these embodiments may be any amino acid, such as, for example, the amino acid of Formula IV, wherein n is 1, 2, 3, 4, 5, 6, 7, 8, 9, 10, 11, 12, 13, 14, 15, or 16. In certain embodiments, n is 2, 3, 4, or 5, in which case, the amino acid is Dab, Orn, Lys, or homoLys respectively. In any of the above exemplary embodiments, the amino acid modification at position 1 that confers GIP agonist activity can be a substitution of His with an amino acid lacking an imidazole side chain.

[0644] Also, with regard to the above exemplary embodiments, amino acid modifications at one, two, or all of positions 27, 28, and 29 can be any of the modifications at these positions described herein. For example, the Met at position 27 can be substituted with a large aliphatic amino acid, optionally Leu, the Asn at position 28 can be substituted with a small aliphatic amino acid, optionally Ala, and/or the Thr at position 29 can be substituted with a small aliphatic amino acid, optionally Gly. Alternatively, the analog can comprise such amino acid modifications at position 27 and/or 28.

[0645] The analog can further comprise, for example, an amino acid modification at position 12, optionally, a substitution with Ile, and/or amino acid modifications at positions 17 and 18, optionally substitution with Q at position 17 and A at position 18, and/or an addition of GPSSGAPPPS (SEQ ID NO: 1095) or XGPSSGAPPPS (SEQ ID NO: 1096), or sequences containing one or more conservative substitutions relative to SEQ ID NO: 1095 or 1096, to the C-terminus. The analog can comprise one or more of the following modifications:
[0646] (i) Ser at position 2 substituted with D-Ser, Ala, D-Ala, Gly, N-methyl-Ser, AIB, Val, or α-amino-N-butyric acid;
[0647] (ii) Tyr at position 10 substituted with Trp, Lys, Orn, Glu, Phe, or Val;
[0648] (iii) Linkage of an acyl group to a Lys at position 10;
[0649] (iv) Lys at position 12 substituted with Arg;
[0650] (v) Ser at position 16 substituted with Glu, Gln, homoglutamic acid, homocysteic acid, Thr, Gly, Lys, or AIB;
[0651] (vi) Arg at position 17 substituted with Gln;
[0652] (vii) Arg at position 18 substituted with Ala, Ser, Thr, or Gly;
[0653] (viii) Gln at position 20 substituted with Ala, Ser, Thr, Lys, Citrulline, Arg, Orn, or AIB;
[0654] (ix) Asp at position 21 substituted with Glu, homoglutamic acid, homocysteic acid;
[0655] (x) Val at position 23 substituted with Ile;
[0656] (xi) Gln at position 24 substituted with Asn, Ala, Ser, Thr, or AIB; and
[0657] (xii) a conservative substitution at any of positions 2, 5, 9, 10, 11, 12, 13, 14, 15, 16, 17, 18, 19, 20, 21, 24, 27, 28, and 29.
   The analog in some embodiments comprise a combination of the modifications (i) through (xii). Alternatively or additionally, the analog can comprise an amino acid modification at position 3 (e.g., an amino acid substitution of Gln with Glu), wherein the analog has less than 1% of the activity of glucagon at the glucagon receptor. Alternatively or additionally, the analog can comprise an amino acid modification at position 7 (e.g., an amino acid substitution of Thr with an amino acid lacking a hydroxyl group, e.g., Abu or Ile), a deletion of the amino acid(s)C-terminal to the amino acid at position 27 or 28, yielding a 27- or 28-amino acid peptide, or a combination thereof, wherein the analog has less than about 10% of the activity of GLP-1 at the GLP-1 receptor.

[0658] With regard to the exemplary embodiments, the analog can be covalently linked to a hydrophilic moiety. In some embodiments, the analog is covalently linked to the hydrophilic moiety at any of amino acid positions 16, 17, 20, 21, 24, 29, 40, or the C-terminus. In certain embodiments, the analog comprises a C-terminal extension (e.g., an amino acid sequence of SEQ ID NO: 1095) and an addition of an amino acid comprising the hydrophilic moiety, such that the hydrophilic moiety is covalently linked to the analog at position 40.

[0659] In some embodiments, the hydrophilic moiety is covalently linked to a Lys, Cys, Orn, homocysteine, or acetyl-phenylalanine of the analog. The Lys, Cys, Orn, homocysteine, or acetyl-phenylalanine may be an amino acid that is native to the glucagon sequence (SEQ ID NO: 1001) or it may be an amino acid which is replacing a native amino acid of SEQ ID NO: 1001. In some embodiments, wherein the hydrophilic moiety is attached to a Cys, the linkage to the hydrophilic moiety can comprise the structure

[chemical structure]

[0660] With regard to the analogs comprising a hydrophilic moiety, the hydrophilic moiety may be any of those described herein. See, e.g., the teachings under the section “Linkage of hydrophilic moieties.” In some embodiments, the hydrophilic moiety is a polyethylene glycol (PEG). The PEG in certain embodiments has a molecular weight of about 1,000 Daltons to about 40,000 Daltons, e.g., about 20,000 Daltons to about 40,000 Daltons.

[0661] In the exemplary embodiments, wherein the analog comprises an acyl or alkyl group, which is attached to the analog via a spacer, the spacer can be any spacer as described herein. The spacer, for example, may be 3 to 10 atoms in length and may be, for instance, an amino acid (e.g., 6-amino hexanoic acid, any amino acid described herein), a dipeptide (e.g., Ala-Ala, βAla-βAla, Leu-Leu, Pro-Pro, γGlu-γGlu), a tripeptide, or a hydrophilic or hydrophobic bifunctional spacer. In certain aspects, the total length of the spacer and the acyl or alkyl group is about 14 to about 28 atoms. In some embodiments, the amino acid spacer is not γ-Glu. In some embodiments, the dipeptide spacer is not γ-Glu-γ-Glu.

[0662] The acyl or alkyl group is any acyl or alkyl group as described herein, such as an acyl or alkyl group which is non-native to a naturally occurring amino acid. The acyl or alkyl group in some embodiments is a C4 to C30 fatty acyl group, such as, for example, a C10 fatty acyl or alkyl group, a C12 fatty acyl or alkyl group, a C14 fatty acyl or alkyl group, a C16 fatty acyl or alkyl group, a C18 fatty acyl or alkyl group, a C20 acyl or alkyl group, or a C22 acyl or alkyl group, or a C4 to C30 alkyl group. In specific embodiments, the acyl group is a C12 to C18 fatty acyl group (e.g., a C14 or C16 fatty acyl group).

[0663] In some embodiments, the extension of about 1 to about 21 amino acids C-terminal to the amino acid at position 29 of the analog comprises the amino acid sequence of GPSSGAPPPS (SEQ ID NO: 1095) or XGPSSGAPPPS (SEQ ID NO: 1096), wherein X is any amino acid, or GPSSGAPPPK (SEQ ID NO: 1170) or XGPSSGAPPPK (SEQ ID NO: 1171) or XGPSSGAPPPSK (SEQ ID NO: 1172), wherein Xis Gly or a small, aliphatic or non-polar or slightly polar amino acid. In some embodiments, the about 1 to about 21 amino acids may comprise sequences containing one or more conservative substitutions relative to SEQ ID NO: 1095, 1096, 1170, 1171 or 1172. In some embodiments, the acylated or alkylated amino acid is located at position 37, 38, 39, 40, 41, 42, or 43 of the C-terminally-extended analog. In certain embodiments, the acylated or alkylated amino acid is located at position 40 of the C-terminally extended analog. In certain embodiments, the acyl or alkyl group is covalently linked to an amino acid which is native to SEQ ID NO: 1001, 1227, 1228, 1229 or 1230 or it may be linked to a substituted amino acid. In certain embodiments, the acyl or alkyl group is covalently linked to an amino acid which is native to SEQ ID NO: 1095, 1096, 1171 or 1172

[0664] The GIP agonist may be a peptide comprising the amino acid sequence of any of the amino acid sequences, e.g., SEQ ID NOs: 1005-1094, optionally with up to 1, 2, 3, 4, or 5 further modifications that retain GIP agonist activity. In certain embodiments, the GIP agonist comprises the amino acids of any of SEQ ID NOs: 1099-1262.

### Class 3 Glucagon Related Peptides

[0665] In certain embodiments, the glucagon related peptide is a Class 3 glucagon related peptide, which is described herein and in International Patent Application No. PCT/US2009/47438 (filed on Jun. 16, 2009), International Patent Application Publication No. WO 2008/101017, published on Aug. 21, 2008, and U.S. Provisional Application No. 61/090,412 and U.S. Application No. 61/177,476, the contents of which are incorporated by reference in their entirety.

[0666] Some of the biological sequences referenced in the following section (SEQ ID NOs: 89-108, 114-128 and 146-656) relating to Class 3 glucagon related peptides correspond to SEQ ID NOs: 89-108, 114-128 and 146-656 in International Patent Application No. PCT/US2009/47438.

### Activity

[0667] The Class 3 glucagon related peptide can be a peptide that exhibits increased activity at the glucagon receptor, and in further embodiments exhibits enhanced biophysical stability and/or aqueous solubility. In addition, in some embodiments, the Class 3 glucagon related peptide has lost native glucagon's selectivity for the glucagon receptor verses the GLP-1 receptor, and thus represents co-agonists of those two receptors. Selected amino acid modifications within the Class 3 glucagon related peptide can control the relative activity of the peptide at the GLP-1 receptor verses the glucagon receptor. Thus, the Class 3 glucagon related peptide can be a glucagon/GLP-1 co-agonist that has higher activity at the glucagon receptor versus the GLP-1 receptor, a glucagon/GLP-1 co-agonist that has approximately equivalent activity at both receptors, or a glucagon/GLP-1 co-agonist that has higher activity at the GLP-1 receptor versus the glucagon receptor. The latter category of co-agonist can be engineered to exhibit little or no activity at the glucagon receptor, and yet retain ability to activate the GLP-1 receptor with the same or better potency than native GLP-1. Any of these co-agonists may also include modifications that confer enhanced biophysical stability and/or aqueous solubility.

Modifications of the Class 3 glucagon related peptide can be made to produce a glucagon related peptide having anywhere from at least about 1% (including at least about 1.5%, 2%, 5%, 7%, 10%, 20%, 30%, 40%, 50%, 60%, 75%, 100%, 125%, 150%, 175%) to about 200% or higher activity at the GLP-1 receptor relative to native GLP-1 and anywhere from at least about 1% (including about 1.5%, 2%, 5%, 7%, 10%, 20%, 30%, 40%, 50%, 60%, 75%, 100%, 125%, 150%, 175%, 200%, 250%, 300%, 350%, 400%, 450%) to about 500% or higher activity at the glucagon receptor relative to native glucagon. The amino acid sequence of native glucagon is SEQ ID NO: 701, the amino acid sequence of GLP-1(7-36)amide is SEQ ID NO: 703, and the amino acid sequence of GLP-1(7-37)acid is SEQ ID NO: 704.

[0668] The Class 3 glucagon related peptide can be a glucagon related peptide with increased or decreased activity at the glucagon receptor, or GLP-1 receptor, or both. The Class 3 glucagon related peptide can be a glucagon related peptide with altered selectivity for the glucagon receptor versus the GLP-1 receptor. As disclosed herein high potency Class 3 glucagon related peptides are provided that also exhibit improved solubility and/or stability.

### Modifications Affecting Glucagon Activity

[0669] Increased activity at the glucagon receptor is provided by an amino acid modification at position 16 of native glucagon (SEQ ID NO: 701). In some embodiments, the Class 3 glucagon related peptide is a glucagon agonist that has been modified relative to the wild type peptide of His-Ser-Gln-Gly-Thr-Phe-Thr-Ser-Asp-Tyr-Ser-Lys-Tyr-Leu-Asp-Ser-Arg-Arg-Ala-Gln-Asp-Phe-Val-Gln-Trp-Leu-Met-Asn-Thr (SEQ ID NO: 701) to enhance the peptide's potency at the glucagon receptor. The normally occurring serine at position 16 of native glucagon (SEQ ID NO: 701) can be substituted with select acidic amino acids to enhance the potency of glucagon, in terms of its ability to stimulate cAMP synthesis in a validated in vitro model assay (see Example 7). More particularly, this substitution enhances the potency of the analog at least 2-fold, 4-fold, 5-fold, and up to 10-fold greater at the glucagon receptor. This substitution also enhances the analog's activity at the GLP-1 receptor at least 5-fold, 10-fold, or 15-fold relative to native glucagon, but selectivity is maintained for the glucagon receptor over the GLP-1 receptor.

[0670] By way of nonlimiting example, such enhanced potency can be provided by substituting the naturally occurring serine at position 16 with glutamic acid or with another negatively charged amino acid having a side chain with a length of 4 atoms, or alternatively with any one of glutamine, homoglutamic acid, or homocysteic acid, or a charged amino acid having a side chain containing at least one heteroatom, (e.g. N, O, S, P) and with a side chain length of about 4 (or 3-5) atoms. In accordance with some embodiments, the serine residue at position 16 of native glucagon is substituted with an amino acid selected from the group consisting of glutamic acid, glutamine, homoglutamic acid, homocysteic acid, threonine, or glycine. In accordance with some embodiments, the serine residue at position 16 of native glucagon is substituted with an amino acid selected from the group consisting of glutamic acid, glutamine, homoglutamic acid and homocysteic acid, and in some embodiments the serine residue is substituted with glutamic acid.

[0671] In some embodiments, the enhanced potency Class 3 glucagon related peptide comprises a peptide of SEQ ID NO: 90, SEQ ID NO: 91, SEQ ID NO: 92, SEQ ID NO: 93, SEQ ID NO: 94, SEQ ID NO: 95 or a glucagon agonist analog of SEQ ID NO: 93. In accordance with some embodiments, a Class 3 glucagon related peptide having enhanced potency at the glucagon receptor relative to wild type glucagon is provided wherein the peptide comprises the sequence of SEQ ID NO: 95, SEQ ID NO: 96, SEQ ID NO: 97 or SEQ ID NO: 98, wherein the glucagon related peptide retains its selectivity for the glucagon receptor relative to the GLP-1 receptors. In some embodiments, the Class 3 glucagon related peptide having enhanced specificity for the glucagon receptor comprises the peptide of SEQ ID NO: 96, SEQ ID NO: 97, SEQ ID NO: 98 or a glucagon agonist analog thereof, wherein the carboxy terminal amino acid retains its native carboxylic acid group. In accordance with some embodiments, a Class 3 glucagon related peptide comprises the sequence of NH2-His-Ser-Gln-Gly-Thr-Phe-Thr-Ser-Asp-Tyr-Ser-Lys-Tyr-Leu-Asp-Glu-Arg-Arg-Ala-Gln-Asp-Phe-Val-Gln-Trp-Leu-Met-Asn-Thr-COOH (SEQ ID NO: 98), wherein the peptide exhibits approximately fivefold enhanced potency at the glucagon receptor, relative to native glucagon as measured by the in vitro cAMP assay of Example 7.

[0672] Glucagon receptor activity can be reduced, maintained, or enhanced by an amino acid modification at position 3, e.g. substitution of the naturally occurring glutamine at position 3. In some embodiments, substitution of the amino acid at position 3 with an acidic, basic, or hydrophobic amino acid (glutamic acid, ornithine, norleucine) has been shown to substantially reduce or destroy glucagon receptor activity. The analogs that are substituted with, for example, glutamic acid, ornithine, or norleucine have about 10% or less of the activity of native glucagon at the glucagon receptor, e.g. about 1-10%, or about 0.1-10%, or greater than about 0.1% but less than about 10%, while exhibiting at least 20% of the activity of GLP-1 at the GLP-1 receptor. For example, exemplary analogs described herein have about 0.5%, about 1% or about 7% of the activity of native glucagon, while exhibiting at least 20% of the activity of GLP-1 at the GLP-1 receptor. In particular, any of the Class 3 glucagon related peptides, including glucagon analogs, glucagon agonist analogs, glucagon co-agonists, and glucagon/GLP-1 co-agonist molecules, described herein may be modified to contain a modification at position 3, e.g., Gln substituted with Glu, to produce a peptide with high selectivity, e.g., tenfold selectivity, for the GLP-1 receptor as compared to the selectivity for the glucagon receptor.

[0673] In another embodiment, the naturally occurring glutamine at position 3 of any of the Class 3 glucagon related peptides can be substituted with a glutamine analog without a substantial loss of activity at the glucagon receptor, and in some cases, with an enhancement of glucagon receptor activity, as described herein. In specific embodiments, the amino acid at position 3 is substituted with Dab(Ac). For example, glucagon agonists can comprise the amino acid sequence of SEQ ID NO: 595, SEQ ID NO: 601 SEQ ID NO: 603, SEQ ID NO: 604, SEQ ID NO: 605, and SEQ ID NO: 606.

[0674] It was observed that modifications at position 2 (e.g. AIB at position 2) and in some cases modifications at position 1 may reduce glucagon activity. This reduction in glucagon activity can be restored by stabilizing the alpha-helix in the C-terminal portion of glucagon, e.g. through means described herein, for example, through a covalent bond between the side chains of the amino acids at positions “i” and “i+4”, e.g., 12 and 16, 16 and 20, or 20 and 24. In some embodiments, this covalent bond is a lactam bridge between a glutamic acid at position 16 and a lysine at position 20. In some embodiments, this covalent bond is an intramolecular bridge other than a lactam bridge. For example, suitable covalent bonding methods include any one or more of olefin metathesis, lanthionine-based cyclization, disulfide bridge or modified sulfur-containing bridge formation, the use of a, w-diaminoalkane tethers, the formation of metal-atom bridges, and other means of peptide cyclization.

### Modifications Affecting GLP-1 Activity

[0675] Enhanced activity at the GLP-1 receptor is provided by replacing the carboxylic acid of the C-terminal amino acid with a charge-neutral group, such as an amide or ester. In some embodiments, these Class 3 glucagon related peptides comprise a sequence of SEQ ID NO: 108, wherein the carboxy terminal amino acid has an amide group in place of the carboxylic acid group found on the native amino acid. These Class 3 glucagon related peptides have strong activity at both the glucagon and GLP-1 receptors and thus act as co-agonists at both receptors. In accordance with some embodiments, the Class 3 glucagon related peptide is a glucagon and GLP-1 receptor co-agonist, wherein the peptide comprises the sequence of SEQ ID NO: 108, wherein the amino acid at position 28 is Asn or Lys and the amino acid at position 29 is Thr-amide.

[0676] Increased activity at the GLP-1 receptor is provided by modifications that stabilize the alpha helix in the C-terminal portion of glucagon (e.g. around residues 12-29). In some embodiments, such modifications permit formation of an intramolecular bridge between the side chains of two amino acids that are separated by three intervening amino acids (i.e., an amino acid at position “i” and an amino acid at position “i+4”, wherein i is any integer between 12 and 25), by two intervening amino acids, i.e., an amino acid at position “j” and an amino acid at position “j+3,” wherein j is any integer between 12 and 27, or by six intervening amino acids, i.e., an amino acid at position “k” and an amino acid at position “k+7,” wherein k is any integer between 12 and 22. In exemplary embodiments, the bridge or linker is about 8 (or about 7-9) atoms in length and forms between side chains of amino acids at positions 12 and 16, or at positions 16 and 20, or at positions 20 and 24, or at positions 24 and 28. The two amino acid side chains can be linked to one another through non-covalent bonds, e.g., hydrogen-bonding, ionic interactions, such as the formation of salt bridges, or by covalent bonds.

[0677] In accordance with some embodiments, the Class 3 glucagon related peptide exhibits glucagon/GLP-1 receptor co-agonist activity and comprises an amino acid sequence selected from the group consisting of SEQ ID NO: 99, 101, 102 and 103. In some embodiments, the side chains are covalently bound to one another, and in some embodiments the two amino acids are bound to one another to form a lactam ring.

In some embodiments, the Class 3 glucagon related peptide comprises a glucagon related peptide analog of SEQ ID NO: 108, wherein the peptide comprises an intramolecular lactam bridge formed between amino acid positions 12 and 16 or between amino acid positions 16 and 20. In some embodiments, the Class 3 glucagon related peptide comprises the sequence of SEQ ID NO: 108, wherein an intramolecular lactam bridge is formed between amino acid positions 12 and 16, between amino acid positions 16 and 20, or between amino acid positions 20 and 24 and the amino acid at position 29 is glycine, wherein the sequence of SEQ ID NO: 29 is linked to the C-terminal amino acid of SEQ ID NO: 108. In a further embodiment, the amino acid at position 28 is aspartic acid.

[0678] In some specific embodiments, stabilization of the alpha helix structure in the C-terminal portion of the Class 3 glucagon related peptide is achieved through the formation of an intramolecular bridge other than a lactam bridge. For example, suitable covalent bonding methods include any one or more of olefin metathesis, lanthionine-based cyclization, disulfide bridge or modified sulfur-containing bridge formation, the use of a, w-diaminoalkane tethers, the formation of metal-atom bridges, and other means of peptide cyclization are used to stabilize the alpha helix.

[0679] Furthermore, enhanced activity at the GLP-1 receptor may be achieved by stabilizing the alpha-helix structure in the C-terminal portion of the glucagon related peptide (around amino acids 12-29) through purposeful introduction of one or more α,α-disubstituted amino acids at positions that retain the desired activity. Such peptides may be considered herein as a peptide lacking an intramolecular bridge. In some aspects, stabilization of the alpha-helix is accomplished in this manner without introduction of an intramolecular bridge such as a salt bridge or covalent bond. In some embodiments, one, two, three, four or more of positions 16, 17, 18, 19, 20, 21, 24 or 29 of a glucagon related peptide is substituted with an α,α-disubstituted amino acid. For example, substitution of position 16 of the Class 3 glucagon related peptide with amino iso-butyric acid (AIB) enhances GLP-1 activity, in the absence of a salt bridge or lactam. In some embodiments, one, two, three or more of positions 16, 20, 21 or 24 are substituted with AIB.

[0680] Enhanced activity at the GLP-1 receptor may be achieved by an amino acid modification at position 20. In some embodiments, the glutamine at position 20 is replaced with another hydrophilic amino acid having a side chain that is either charged or has an ability to hydrogen-bond, and is at least about 5 (or about 4-6) atoms in length, for example, lysine, citrulline, arginine, or ornithine.

[0681] Increased activity at the GLP-1 receptor is demonstrated in Class 3 glucagon related peptides comprising the C-terminal extension of SEQ ID NO: 78. GLP-1 activity in such Class 3 glucagon related peptides comprising SEQ ID NO: 78 can be further increased by modifying the amino acid at position 18, 28 or 29, or at position 18 and 29, as described herein. A further modest increase in GLP-1 potency may be achieved by modifying the amino acid at position 10 to be Trp.

[0682] Combinations of the modifications that increase GLP-1 receptor activity may provide higher GLP-1 activity than any of such modifications taken alone. For example, the Class 3 glucagon related peptides can comprise modifications at position 16, at position 20, and at the C-terminal carboxylic acid group, optionally with a covalent bond between the amino acids at positions 16 and 20; can comprise modifications at position 16 and at the C-terminal carboxylic acid group; can comprise modifications at positions 16 and 20, optionally with a covalent bond between the amino acids at positions 16 and 20; or can comprise modifications at position 20 and at the C-terminal carboxylic acid group; optionally with the proviso that the amino acid at position 12 is not Arg; or optionally with the proviso that the amino acid at position 9 is not Glu.

### Modifications Affecting Solubility

### Addition of Hydrophilic Moieties

[0683] The Class 3 glucagon related peptides can be further modified to improve the peptide's solubility and stability in aqueous solutions at physiological pH, while retaining the high biological activity relative to native glucagon. Hydrophilic moieties as discussed herein can be attached to the Class 3 glucagon related peptide as further discussed herein. In accordance with some embodiments, introduction of hydrophilic groups at positions 17, 21, and 24 of the Class 3 glucagon related peptide comprising SEQ ID NO: 97 or SEQ ID NO: 98 are anticipated to improve the solubility and stability of the high potency glucagon analog in solutions having a physiological pH. Introduction of such groups also increases duration of action, e.g. as measured by a prolonged half-life in circulation.

[0684] In some embodiments, the Class 3 glucagon related peptide comprises a sequence selected from the group consisting of SEQ ID NO: 99, SEQ ID NO: 100, SEQ ID NO: 101, SEQ ID NO: 102, SEQ ID NO: 103, SEQ ID NO: 104, SEQ ID NO: 105, SEQ ID NO: 106 and SEQ ID NO: 107, wherein the side chain of an amino acid residue at one of position 16, 17, 21 or 24 of said Class 3 glucagon related peptide further comprises a polyethylene glycol chain, having a molecular weight selected from the range of about 500 to about 40,000 Daltons. In some embodiments, the polyethylene glycol chain has a molecular weight selected from the range of about 500 to about 5,000 Daltons. In another embodiment. the polyethylene glycol chain has a molecular weight of about 10,000 to about 20,000 Daltons. In yet other exemplary embodiments the polyethylene glycol chain has a molecular weight of about 20,000 to about 40,000 Daltons. In accordance with some embodiments the hydrophilic group comprises a polyethylene (PEG) chain. More particularly, in some embodiments, the Class 3 glucagon related peptide comprises the sequence of SEQ ID NO: 94 or SEQ ID NO: 95 wherein a PEG chain is covalently linked to the side chains of amino acids present at positions 21 and 24 of the Class 3 glucagon related peptide and the carboxy terminal amino acid of the Class 3 glucagon related peptide has the carboxylic acid group. In accordance with some embodiments, the polyethylene glycol chain has an average molecular weight selected from the range of about 500 to about 10,000 Daltons.

[0685] In accordance with some embodiments, the pegylated Class 3 glucagon related peptide comprises two or more polyethylene glycol chains covalently bound to the Class 3 glucagon related peptide wherein the total molecular weight of the glucagon chains is about 1,000 to about 5,000 Daltons. In some embodiments the pegylated glucagon agonist comprises a peptide consisting of SEQ ID NO: 93 or a glucagon agonist analog of SEQ ID NO: 93, wherein a PEG chain is covalently linked to the amino acid residue at position 21 and at position 24, and wherein the combined molecular weight of the two PEG chains is about 1,000 to about 5,000 Daltons.

### Charged C-Terminus

[0686] The solubility of the Class 3 glucagon related peptide comprising SEQ ID NO: 20 can be further improved, for example, by introducing one, two, three or more charged amino acid(s) to the C-terminal portion of glucagon related peptide of SEQ ID NO: 108, preferably at a position C-terminal to position 27. Such a charged amino acid can be introduced by substituting a native amino acid with a charged amino acid, e.g. at positions 28 or 29, or alternatively by adding a charged amino acid, e.g. after position 27, 28 or 29. In exemplary embodiments, one, two, three or all of the charged amino acids are negatively charged. Additional modifications, e.g. conservative substitutions, may be made to the Class 3 glucagon related peptide that still allow it to retain glucagon activity. In some embodiments, an analog of the Class 3 glucagon related peptide of SEQ ID NO: 108 is provided wherein the analog differs from SEQ ID NO: 108 by 1 to 2 amino acid substitutions at positions 17-26, and, in some embodiments, the analog differs from the peptide of SEQ ID NO: 108 by an amino acid substitution at position 20.

### Acylation/Alkylation

[0687] In accordance with some embodiments, the glucagon related peptide is modified to comprise an acyl or alkyl group, e.g., a C4 to C30 acyl or alkyl group. In some embodiments, the invention provides a Class 3 glucagon related peptide modified to comprise an acyl group or alkyl group covalently linked to the amino acid at position 10 of the glucagon related peptide. The glucagon related peptide may further comprise a spacer between the amino acid at position 10 of the Class 3 glucagon related peptide and the acyl group or alkyl group. Any of the foregoing Class 3 glucagon related peptides may comprise two acyl groups or two alkyl groups, or a combination thereof. In a specific aspect of the invention, the acylated Class 3 glucagon related peptide comprises the amino acid sequence of any of SEQ ID NOs: 534-544 and 546-549.

### C-Terminal Truncation

[0688] In some embodiments, the Class 3 glucagon related peptides described herein are further modified by truncation or deletion of one or two amino acids of the C-terminus of the glucagon peptide (i.e., position 29 and/or 28) without affecting activity and/or potency at the glucagon and GLP-1 receptors. In this regard, the Class 3 glucagon related peptide can comprise amino acids 1-27 or 1-28 of the native glucagon peptide (SEQ ID NO: 1), optionally with one or more modifications described herein. In some embodiments, the truncated Class 3 glucagon related peptide comprises SEQ ID NO: 550 or SEQ ID NO: 551. In another embodiment, the truncated glucagon agonist peptide comprises SEQ ID NO: 552 or SEQ ID NO: 553.

### C-Terminal Extension

[0689] In accordance with some embodiments, the Class 3 glucagon related peptides disclosed herein are modified by the addition of a second peptide to the carboxy terminus of the glucagon related peptide, for example, SEQ ID NO: 78, SEQ ID NO: 117 or SEQ ID NO: 118. In some embodiments, a Class 3 glucagon related peptide having a sequence selected from the group consisting of SEQ ID NO: 99, SEQ ID NO: 100, SEQ ID NO: 101, SEQ ID NO: 102, SEQ ID NO: 103, SEQ ID NO: 104, SEQ ID NO: 105, SEQ ID NO: 106, SEQ ID NO: 107, SEQ ID NO: 109, SEQ ID NO: 110, SEQ ID NO: 111, and SEQ ID NO: 69 is covalently bound through a peptide bond to a second peptide, wherein the second peptide comprises a sequence selected from the group consisting of SEQ ID NO: 78, SEQ ID NO: 117 and SEQ ID NO: 118. In a further embodiment, in Class 3 glucagon related peptides which comprise the C-terminal extension, the threonine at position 29 of the native glucagon related peptide is replaced with a glycine. A Class 3 glucagon related peptide having a glycine substitution for threonine at position 29 and comprising the carboxy terminal extension of SEQ ID NO: 78 is four times as potent at the GLP-1 receptor as native glucagon modified to comprise the carboxy terminal extension of SEQ ID NO: 78. Potency at the GLP-1 receptor can be further enhanced by an alanine substitution for the native arginine at position 18.

[0690] Accordingly, the Class 3 glucagon related peptide can have a carboxy terminal extension of SEQ ID NO: 117 (KRNRNNIA) or SEQ ID NO: 118. In accordance with some embodiments, Class 3 glucagon related peptide comprising SEQ ID NO: 81 or SEQ ID NO: 108, further comprises the amino acid sequence of SEQ ID NO: 117 (KRNRNNIA) or SEQ ID NO: 118 linked to amino acid 29 of the glucagon related peptide. More particularly, the Class 3 glucagon related peptide comprises a sequence selected from the group consisting of SEQ ID NO: 98, SEQ ID NO: 100, SEQ ID NO: 101, SEQ ID NO: 102 and SEQ ID NO: 103, further comprising the amino acid sequence of SEQ ID NO: 117 (KRNRNNIA) or SEQ ID NO: 118 linked to amino acid 29 of the glucagon related peptide. More particularly, the glucagon related peptide comprises a sequence selected from the group consisting of SEQ ID NO: 98, SEQ ID NO: 100, SEQ ID NO: 101, SEQ ID NO: 102, SEQ ID NO: 103, SEQ ID NO: 104, SEQ ID NO: 105, SEQ ID NO: 106, SEQ ID NO: 109, SEQ ID NO: 110, SEQ ID NO: 111, SEQ ID NO: 112, SEQ ID NO: 72 and SEQ ID NO: 120 further comprising the amino acid sequence of SEQ ID NO: 78 (GPSSGAPPPS) or SEQ ID NO: 79 linked to amino acid 29 of the Class 3 glucagon related peptide. In some embodiments, the Class 3 glucagon related peptide comprises the sequence of SEQ ID NO: 121.

[0691] Any of the modifications described above with regard to Class 3 glucagon related peptides which increase or decrease glucagon receptor activity and which increase GLP-1 receptor activity can be applied individually or in combination. Exemplary modifications include but are not limited to:

[0692] (A) Improving solubility, for example, by introducing one, two, three or more charged amino acid(s) to the C-terminal portion of native glucagon, preferably at a position C-terminal to position 27. Such a charged amino acid can be introduced by substituting a native amino acid with a charged amino acid, e.g. at positions 28 or 29, or alternatively by adding a charged amino acid, e.g. after position 27, 28 or 29. In exemplary embodiments, one, two, three or all of the charged amino acids are negatively charged. In other embodiments, one, two, three or all of the charged amino acids are positively charged. Such modifications increase solubility, e.g. provide at least 2-fold, 5-fold, 10-fold, 15-fold, 25-fold, 30-fold or greater solubility relative to native glucagon at a given pH between about 5.5 and 8, e.g., pH 7, when measured after 24 hours at 25° C.

[0693] (B) Increasing solubility and duration of action or half-life in circulation by addition of a hydrophilic moiety such as a polyethylene glycol chain, as described herein, e.g. at position 16, 17, 20, 21, 24 or 29, or at the C-terminal amino acid of the peptide.

[0694] (C) Increasing stability by modification of the aspartic acid at position 15, for example, by deletion or substitution with glutamic acid, homoglutamic acid, cysteic acid or homocysteic acid. Such modifications can reduce degradation or cleavage at a pH within the range of 5.5 to 8, especially in acidic or alkaline buffers, for example, retaining at least 75%, 80%, 90%, 95%, 96%, 97%, 98% or 99% of the original peptide after 24 hours at 25° C.

[0695] (D) Increasing stability by modification of the methionine at position 27, for example, by substitution with leucine or norleucine. Such modifications can reduce oxidative degradation. Stability can also be increased by modification of the Gln at position 20 or 24, e.g. by substitution with Ser, Thr, Ala or AIB. Such modifications can reduce degradation that occurs through deamidation of Gln. Stability can be increased by modification of Asp at position 21, e.g. by substitution with Glu. Such modifications can reduce degradation that occurs through dehydration of Asp to form a cyclic succinimide intermediate followed by isomerization to iso-aspartate.

[0696] (E) Increasing resistance to dipeptidyl peptidase IV (DPP IV) cleavage by modification of the amino acid at position 1 or 2 with the DPP-IV resistant amino acids described herein and including modification of the amino acid at position 2 with N-methyl-alanine.

[0697] (F) Conservative or non-conservative substitutions, additions or deletions that do not affect activity, for example, conservative substitutions at one or more of positions 2, 5, 7, 10, 11, 12, 13, 14, 16, 17, 18, 19, 20, 21, 24, 27, 28 or 29; deletions at one or more of positions 27, 28 or 29; or a deletion of amino acid 29 optionally combined with a C-terminal amide or ester in place of the C-terminal carboxylic acid group;

[0698] (G) Adding C-terminal extensions as described herein;

[0699] (H) Increasing half-life in circulation and/or extending the duration of action and/or delaying the onset of action, for example, through acylation or alkylation of the glucagon related peptide, as described herein;

[0700] (I) Homodimerization or heterodimerization as described herein.

[0701] Other modifications include substitution of His at position 1 with a large, aromatic amino acid (e.g., Tyr, Phe, Trp or amino-Phe); Ser at position 2 with Ala; substitution of Tyr at position 10 with Val or Phe; substitution of Lys at position 12 with Arg; substitution of Asp at position 15 with Glu; substitution of Ser at position 16 with Thr or AIB.

[0702] Class 3 glucagon related peptides with GLP-1 activity that contain a non-conservative substitution of His at position 1 with a large, aromatic amino acid (e.g., Tyr) can retain GLP-1 activity provided that the alpha-helix is stabilized via an intramolecular bridge, e.g., such as any of those described herein.

### Conjugates and Fusions

[0703] The Class 3 glucagon related peptide can be linked, optionally via covalent bonding and optionally via a linker, to a conjugate moiety. The Class 3 glucagon related peptide also can be part of a fusion peptide or protein wherein a second peptide or polypeptide has been fused to a terminus, e.g., the carboxy terminus of the Class 3 glucagon related peptide. More particularly, the fusion Class 3 glucagon related peptide may comprise a glucagon agonist of SEQ ID NO: 72, SEQ ID NO: 97 or SEQ ID NO: 98 further comprising an amino acid sequence of SEQ ID NO: 78 (GPSSGAPPPS), SEQ ID NO: 117 (KRNRNNIA) or SEQ ID NO: 118 (KRNR) linked to amino acid 29 of the glucagon related peptide. In some embodiments, the amino acid sequence of SEQ ID NO: 78 (GPSSGAPPPS), SEQ ID NO: 117 (KRNRNNIA) or SEQ ID NO: 118 (KRNR) is bound to amino acid 29 of the Class 3 glucagon related peptide through a peptide bond. Applicants have discovered that in Class 3 glucagon related peptide fusion peptides comprising the C-terminal extension peptide of Exendin-4 (e.g., SEQ ID NO: 78 or SEQ ID NO: 79), substitution of the native threonine residue at position 29 with glycine dramatically increases GLP-1 receptor activity. This amino acid substitution can be used in conjunction with other modifications disclosed herein with regard to Class 3 glucagon related peptides to enhance the affinity of the glucagon analogs for the GLP-1 receptor. For example, the T29G substitution can be combined with the S16E and N20K amino acid substitutions, optionally with a lactam bridge between amino acids 16 and 20, and optionally with addition of a PEG chain as described herein.

[0704] In some embodiments, a Class 3 glucagon related peptide comprises the sequence of SEQ ID NO: 121. In some embodiments, the Class 3 glucagon related peptide portion of the glucagon fusion peptide is selected from the group consisting of SEQ ID NO: 72, SEQ ID NO: 90, SEQ ID NO: 91, SEQ ID NO: 92, and SEQ ID NO: 93 wherein a PEG chain, when present at positions 17, 21, 24, or the C-terminal amino acid, or at both 21 and 24, is selected from the range of 500 to 40,000 Daltons. More particularly, in some embodiments, the Class 3 glucagon related peptide segment is selected from the group consisting of SEQ ID NO: 95, SEQ ID NO: 96, and SEQ ID NO: 122, wherein the PEG chain is selected from the range of 500 to 5,000. In some embodiments, the Class 3 glucagon related peptide is a fusion peptide comprising the sequence of SEQ ID NO: 72 and SEQ ID NO: 80 wherein the peptide of SEQ ID NO: 80 is linked to the carboxy terminus of SEQ ID NO: 72.

[0705] In accordance with some embodiments, an additional chemical modification of the Class 3 glucagon related peptide of SEQ ID NO: 98 bestows increased GLP-1 receptor potency to a point where the relative activity at the glucagon and GLP-1 receptors is virtually equivalent. Accordingly, in some embodiments, a Class 3 glucagon related peptide comprises a terminal amino acid comprising an amide group in place of the carboxylic acid group that is present on the native amino acid. The relative activity of the Class 3 glucagon related peptide at the respective glucagon and GLP-1 receptors can be adjusted by further modifications to the Class 3 glucagon related peptide to produce analogs demonstrating about 40% to about 500% or more of the activity of native glucagon at the glucagon receptor and about 20% to about 200% or more of the activity of native GLP-1 at the GLP-1 receptor, e.g. 50-fold, 100-fold or more increase relative to the normal activity of glucagon at the GLP-1 receptor.

### Exemplary Embodiments

[0706] In accordance with some embodiments, a glucagon analog is provided comprising the sequence of SEQ ID NO: 72, wherein said analog differs from SEQ ID NO: 72 by 1 to 3 amino acids, selected from positions 1, 2, 3, 5, 7, 10, 11, 13, 14, 17, 18, 19, 21, 24, 27, 28, and 29, wherein said glucagon related peptide exhibits at least 20% of the activity of native GLP-1 at the GLP-1 receptor.

[0707] In accordance with some embodiments a glucagon/GLP-1 receptor co-agonist is provided comprising the sequence:

NH2-His-Ser-Gln-Gly-Thr-Phe-Thr-Ser-Asp-Tyr-Ser-Lys-Tyr-Leu-Xaa-Xaa-Arg-Arg-Ala-Xaa-Asp-Phe-Val-Xaa-Trp-Leu-Met-Xaa-Xaa-R (SEQ ID NO: 81) wherein the Xaa at position 15 is selected from the group of amino acids consisting of Asp, Glu, cysteic acid, homoglutamic acid and homocysteic acid, Xaa at position 16 is selected from the group of amino acids consisting of Ser, Glu, Gln, homoglutamic acid and homocysteic acid, the Xaa at position 20 is Gln or Lys, the Xaa at position 24 is Gln or Glu, the Xaa at position 28 is Asn, Lys or an acidic amino acid, the Xaa at position 29 is Thr, Gly or an acidic amino acid, and R is COOH or CONH2, with the proviso that when position 16 is serine, position 20 is Lys, or alternatively when position 16 is serine the position 24 is Glu and either position 20 or position 28 is Lys. In some embodiments the glucagon/GLP-1 receptor co-agonist comprises the sequence of SEQ ID NO: 81 wherein the amino acid at position 28 is aspartic acid and the amino acid at position 29 is glutamic acid. In another embodiment the amino acid at position 28 is the native asparagine, the amino acid at position 29 is glycine and the amino acid sequence of SEQ ID NO: 79 or SEQ ID NO: 80 is covalently linked to the carboxy terminus of SEQ ID NO: 81.

[0708] In some embodiments a co-agonist is provided comprising the sequence of SEQ ID NO: 81 wherein an additional acidic amino acid added to the carboxy terminus of the peptide. In a further embodiment the carboxy terminal amino acid of the glucagon analog has an amide in place of the carboxylic acid group of the natural amino acid. In some embodiments the glucagon analog comprises a sequence selected from the group consisting of SEQ ID NO: 85, SEQ ID NO: 86, SEQ ID NO: 87, and SEQ ID NO: 88.

[0709] In accordance with some embodiments a glucagon related peptide analog of SEQ ID NO: 81 is provided, wherein said analog differs from SEQ ID NO: 81 by 1 to 3 amino acids, selected from positions 1, 2, 3, 5, 7, 10, 11, 13, 14, 17, 18, 19, 21 and 27, with the proviso that when the amino acid at position 16 is serine, either position 20 is lysine, or a lactam bridge is formed between the amino acid at position 24 and either the amino acid at position 20 or position 28. In accordance with some embodiments the analog differs from SEQ ID NO: 81 by 1 to 3 amino acids selected from positions 1, 2, 3, 21 and 27. In some embodiments the glucagon peptide analog of SEQ ID NO: 81 differs from that sequence by 1 to 2 amino acids, or in some embodiments by a single amino acid, selected form positions 1, 2, 3, 5, 7, 10, 11, 13, 14, 17, 18, 19, 21 and 27, with the proviso that when the amino acid at position 16 is serine, either position 20 is lysine, or a lactam bridge is formed between the amino acid at position 24 and either the amino acid at position 20 or position 28.

[0710] In accordance with another embodiment a relatively selective GLP-1 receptor agonist is provided comprising the sequence NH2-His-Ser-Xaa-Gly-Thr-Phe-Thr-Ser-Asp-Tyr-Ser-Lys-Tyr-Leu-Xaa-Xaa-Arg-Arg-Ala-Xaa-Asp-Phe-Val-Xaa-Trp-Leu-Met-Xaa-Xaa-R (SEQ ID NO: 83) wherein the Xaa at position 3 is selected from the group of amino acids consisting of Glu, Orn or Nle, the Xaa at position 15 is selected from the group of amino acids consisting of Asp, Glu, cysteic acid, homoglutamic acid and homocysteic acid, Xaa at position 16 is selected from the group of amino acids consisting of Ser, Glu, Gln, homoglutamic acid and homocysteic acid, the Xaa at position 20 is Gln or Lys, the Xaa at position 24 is Gln or Glu, the Xaa at position 28 is Asn, Lys or an acidic amino acid, the Xaa at position 29 is Thr, Gly or an acidic amino acid, and R is COOH, CONH2, SEQ ID NO: 78 or SEQ ID NO: 79, with the proviso that when position 16 is serine, position 20 is Lys, or alternatively when position 16 is serine the position 24 is Glu and either position 20 or position 28 is Lys. In some embodiments the amino acid at position 3 is glutamic acid. In some embodiments the acidic amino acid substituted at position 28 and/or 29 is aspartic acid or glutamic acid.

[0711] In some embodiments the glucagon related peptide, including a co-agonist peptide, comprises the sequence of SEQ ID NO: 81 further comprising an additional acidic amino acid added to the carboxy terminus of the peptide. In a further embodiment the carboxy terminal amino acid of the glucagon analog has an amide in place of the carboxylic acid group of the natural amino acid.

[0712] In accordance with some embodiments a glucagon/GLP-1 receptor co-agonist is provided comprising a modified glucagon related peptide selected from the group consisting of:

NH2-His-Ser-Gln-Gly-Thr-Phe-Thr-Ser-Asp-Tyr-Ser-Lys-Tyr-Leu-Xaa-Xaa-Arg-Arg-Ala-Xaa-Asp-Phe-Val-Xaa-Trp-Leu-Met-Xaa-Xaa-R (SEQ ID NO: 82), wherein the Xaa at position 15 is selected from the group of amino acids consisting of Asp, Glu, cysteic acid, homoglutamic acid and homocysteic acid, Xaa at position 16 is selected from the group of amino acids consisting of Ser, Glu, Gln, homoglutamic acid and homocysteic acid, the Xaa at position 20 is Gln or Lys, the Xaa at position 24 is Gln or Glu and the Xaa at position 28 is Asn, Asp or Lys, R is COOH or CONH2, the Xaa at position 29 is Thr or Gly, and R is COOH, CONH2, SEQ ID NO: 78 or SEQ ID NO: 79, with the proviso that when position 16 is serine, position 20 is Lys, or alternatively when position 16 is serine the position 24 is Glu and either position 20 or position 28 is Lys. In some embodiments R is CONH2, the Xaa at position 15 is Asp, the Xaa at position 16 is selected from the group of amino acids consisting of Glu, Gln, homoglutamic acid and homocysteic acid, the Xaas at positions 20 and 24 are each Gln the Xaa at position 28 is Asn or Asp and the Xaa at position 29 is Thr. In some embodiments the Xaas at positions 15 and 16 are each Glu, the Xaas at positions 20 and 24 are each Gln, the Xaa at position 28 is Asn or Asp, the Xaa at position 29 is Thr and R is CONH2.

[0713] It has been reported that certain positions of the native glucagon peptide can be modified while retaining at least some of the activity of the parent peptide. Accordingly, applicants anticipate that one or more of the amino acids located at positions at positions 2, 5, 7, 10, 11, 12, 13, 14, 17, 18, 19, 20, 21, 24, 27, 28 or 29 of the peptide of SEQ ID NO: 99 can be substituted with an amino acid different from that present in the native glucagon peptide, and still retain activity at the glucagon receptor. In some embodiments the methionine residue present at position 27 of the native peptide is changed to leucine or norleucine to prevent oxidative degradation of the peptide. In another embodiment the amino acid at position 20 is substituted with Lys, Arg, Orn or Citrulline and/or position 21 is substituted with Glu, homoglutamic acid or homocysteic acid.

[0714] In some embodiments a glucagon analog of SEQ ID NO: 108 is provided wherein 1 to 6 amino acids, selected from positions 1, 2, 5, 7, 10, 11, 13, 14, 17, 18, 19, 21, 27, 28 or 29 of the analog differ from the corresponding amino acid of SEQ ID NO: 701, with the proviso that when the amino acid at position 16 is serine, position 20 is Lys, or alternatively when position 16 is serine the position 24 is Glu and either position 20 or position 28 is Lys. In accordance with another embodiment a glucagon analog of SEQ ID NO: 108 is provided wherein 1 to 3 amino acids selected from positions 1, 2, 5, 7, 10, 11, 13, 14, 17, 18, 19, 20, 21, 27, 28 or 29 of the analog differ from the corresponding amino acid of SEQ ID NO: 701. In another embodiment, a glucagon analog of SEQ ID NO: 96, SEQ ID NO: 97 or SEQ ID NO: 99 is provided wherein 1 to 2 amino acids selected from positions 1, 2, 5, 7, 10, 11, 13, 14, 17, 18, 19, 20 or 21 of the analog differ from the corresponding amino acid of SEQ ID NO: 701, and in a further embodiment the one to two differing amino acids represent conservative amino acid substitutions relative to the amino acid present in the native glucagon sequence (SEQ ID NO: 701). In some embodiments a glucagon peptide of SEQ ID NO: 100, SEQ ID NO: 101, SEQ ID NO: 102 or SEQ ID NO: 103 is provided wherein the glucagon peptide further comprises one, two or three amino acid substitutions at positions selected from positions 2, 5, 7, 10, 11, 13, 14, 17, 18, 19, 20, 21, 27 or 29. In some embodiments the substitutions at positions 2, 5, 7, 10, 11, 13, 14, 16, 17, 18, 19, 20, 21, 27 or 29 are conservative amino acid substitutions.

[0715] In accordance with some embodiments a glucagon/GLP-1 receptor co-agonist is provided comprising a variant of the sequence of SEQ ID NO 81, wherein 1 to 10 amino acids selected from positions 16, 17, 18, 20, 21, 23, 24, 27, 28 and 29, respectively, of the variant differ from the corresponding amino acid of SEQ ID NO: 701. In accordance with some embodiments a variant of the sequence of SEQ ID NO 81 is provided wherein the variant differs from SEQ ID NO: 81 by one or more amino acid substitutions selected from the group consisting of Gln17, Ala18, Glu21, Ile23, Ala24, Val27 and Gly29. In accordance with some embodiments a glucagon/GLP-1 receptor co-agonist is provided comprising variants of the sequence of SEQ ID NO 81, wherein 1 to 2 amino acids selected from positions 17-26 of the variant differ from the corresponding amino acid of SEQ ID NO: 701. In accordance with some embodiments a variant of the sequence of SEQ ID NO 81 is provided wherein the variant differs from SEQ ID NO: 81 by an amino acid substitution selected from the group consisting of Gln17, Ala18, Glu21, Ile23 and Ala24. In accordance with some embodiments a variant of the sequence of SEQ ID NO 81 is provided wherein the variant differs from SEQ ID NO: 81 by an amino acid substitution at position 18 wherein the substituted amino acid is selected from the group consisting of Ala, Ser, Thr, and Gly. In accordance with some embodiments a variant of the sequence of SEQ ID NO 81 is provided wherein the variant differs from SEQ ID NO: 81 by an amino acid substitution of Ala at position 18. Such variations are encompassed by SEQ ID NO: 72. In another embodiment a glucagon/GLP-1 receptor co-agonist is provided comprising variants of the sequence of SEQ ID NO 81, wherein 1 to 2 amino acids selected from positions 17-22 of the variant differ from the corresponding amino acid of SEQ ID NO: 701, and in a further embodiment a variant of SEQ ID NO 81 is provided wherein the variant differs from SEQ ID NO: 81 by for 2 amino acid substitutions at positions 20 and 21.

[0716] In accordance with some embodiments a glucagon/GLP-1 receptor co-agonist is provided comprising the sequence:

NH2-His-Ser-Gln-Gly-Thr-Phe-Thr-Ser-Asp-Tyr-Ser-Lys-Tyr-Leu-Xaa-Xaa-Arg-Arg-Ala-Xaa-Xaa-Phe-Val-Xaa-Trp-Leu-Met-Xaa-Xaa-R (SEQ ID NO: 123), wherein the Xaa at position 15 is Asp, Glu, cysteic acid, homoglutamic acid or homocysteic acid, the Xaa at position 16 is Ser, Glu, Gln, homoglutamic acid or homocysteic acid, the Xaa at position 20 is Gln, Lys, Arg, Orn or citrulline, the Xaa at position 21 is Asp, Glu, homoglutamic acid or homocysteic acid, the Xaa at position 24 is Gln or Glu, the Xaa at position 28 is Asn, Lys or an acidic amino acid, the Xaa at position 29 is Thr or an acid amino acid and R is COOH or CONH₂. In some embodiments R is CONH₂. In accordance with some embodiments a glucagon/GLP-1 receptor co-agonist is provided comprising a variant of SEQ ID NO: 99, SEQ ID NO: 100, SEQ ID NO: 101, SEQ ID NO: 102, SEQ ID NO: 103, SEQ ID NO: 114, SEQ ID NO: 115 or SEQ ID NO: 116, wherein the variant differs from said sequence by an amino acid substitution at position 20. In some embodiments the amino acid substitution is selected form the group consisting of Lys, Arg, Orn or citrulline for position 20.

[0717] In some embodiments a glucagon agonist is provided comprising an analog peptide of SEQ ID NO: 82 wherein the analog differs from SEQ ID NO: 82 by having an amino acid other than serine at position 2. In some embodiments the serine residue is substituted with aminoisobutyric acid, D-alanine, and in some embodiments the serine residue is substituted with aminoisobutyric acid. Such modifications suppresses cleavage by dipeptidyl peptidase IV while retaining the inherent potency of the parent compound (e.g. at least 75, 80, 85, 90, 95% or more of the potency of the parent compound). In some embodiments the solubility of the analog is increased, for example, by introducing one, two, three or more charged amino acid(s) to the C-terminal portion of native glucagon, preferably at a position C-terminal to position 27. In exemplary embodiments, one, two, three or all of the charged amino acids are negatively charged. In another embodiment the analog further comprises an acidic amino acid substituted for the native amino acid at position 28 or 29 or an acidic amino acid added to the carboxy terminus of the peptide of SEQ ID NO: 82.

[0718] In some embodiments the glucagon analogs disclosed herein are further modified at position 1 or 2 to reduce susceptibility to cleavage by dipeptidyl peptidase IV. In some embodiments a glucagon analog of SEQ ID NO: 97, SEQ ID NO: 99, SEQ ID NO: 100, SEQ ID NO: 101, SEQ ID NO: 102 or SEQ ID NO: 103 is provided wherein the analog differs from the parent molecule by a substitution at position 2 and exhibits reduced susceptibility (i.e., resistance) to cleavage by dipeptidyl peptidase IV. More particularly, in some embodiments position 2 of the analog peptide is substituted with an amino acid selected from the group consisting of D-serine, D-alanine, valine, amino n-butyric acid, glycine, N-methyl serine and aminoisobutyric acid. In some embodiments position 2 of the analog peptide is substituted with an amino acid selected from the group consisting of D-serine, D-alanine, glycine, N-methyl serine and aminoisobutyric acid. In another embodiment position 2 of the analog peptide is substituted with an amino acid selected from the group consisting of D-serine, glycine, N-methyl serine and aminoisobutyric acid. In some embodiments the amino acid at position 2 is not D-serine. In some embodiments the glucagon related peptide comprises the sequence of SEQ ID NO: 127 or SEQ ID NO: 128.

[0719] In some embodiments a glucagon analog of SEQ ID NO: 97, SEQ ID NO: 99, SEQ ID NO: 100, SEQ ID NO: 101, SEQ ID NO: 102 or SEQ ID NO: 103 is provided wherein the analog differs from the parent molecule by a substitution at position 1 and exhibits reduced susceptibility (i.e., resistance) to cleavage by dipeptidyl peptidase IV. More particularly, position 1 of the analog peptide is substituted with an amino acid selected from the group consisting of D-histidine, alpha, alpha-dimethyl imidiazole acetic acid (DMIA), N-methyl histidine, alpha-methyl histidine, imidazole acetic acid, desaminohistidine, hydroxyl-histidine, acetyl-histidine and homo-histidine. In another embodiment a glucagon agonist is provided comprising an analog peptide of SEQ ID NO: 82 wherein the analog differs from SEQ ID NO: 82 by having an amino acid other than histidine at position 1. In some embodiments the solubility of the analog is increased, for example, by introducing one, two, three or more charged amino acid(s) to the C-terminal portion of native glucagon, preferably at a position C-terminal to position 27. In exemplary embodiments, one, two, three or all of the charged amino acids are negatively charged. In another embodiment the analog further comprises an acidic amino acid substituted for the native amino acid at position 28 or 29 or an acidic amino acid added to the carboxy terminus of the peptide of SEQ ID NO: 82. In some embodiments the acidic amino acid is aspartic acid or glutamic acid.

[0720] In some embodiments the glucagon/GLP-1 receptor co-agonist comprises a sequence of SEQ ID NO: 108 further comprising an additional carboxy terminal extension of one amino acid or a peptide selected from the group consisting of SEQ ID NO: 78, SEQ ID NO: 117 and SEQ ID NO: 118. In the embodiment wherein a single amino acid is added to the carboxy terminus of SEQ ID NO: 108, the amino acid is typically selected from one of the 20 common amino acids, and in some embodiments the additional carboxy terminus amino acid has an amide group in place of the carboxylic acid of the native amino acid. In some embodiments the additional amino acid is selected from the group consisting of glutamic acid, aspartic acid and glycine.

[0721] In an alternative embodiment a glucagon/GLP-1 receptor co-agonist is provided wherein the peptide comprises at least one lactam ring formed between the side chain of a glutamic acid residue and a lysine residue, wherein the glutamic acid residue and a lysine residue are separated by three amino acids. In some embodiments the carboxy terminal amino acid of the lactam bearing glucagon peptide has an amide group in place of the carboxylic acid of the native amino acid. More particularly, in some embodiments a glucagon and GLP-1 co-agonist is provided comprising a modified glucagon peptide selected from the group consisting of:

[0722] NH₂-His-Ser-Gln-Gly-Thr-Phe-Thr-Ser-Asp-Tyr-Ser-Lys-Tyr-Leu-Asp-Glu-Arg-Arg-Ala-Gln-Asp-Phe-Val-Gln-Trp-Leu-Met-Xaa-Xaa-R (SEQ ID NO: 66)

[0723] NH₂-His-Ser-Gln-Gly-Thr-Phe-Thr-Ser-Asp-Tyr-Ser-Lys-Tyr-Leu-Asp-Glu-Arg-Arg-Ala-Lys-Asp-Phe-Val-Gln-Trp-Leu-Met-Xaa-Xaa-R (SEQ ID NO: 109)

[0724] NH₂-His-Ser-Gln-Gly-Thr-Phe-Thr-Ser-Asp-Tyr-Ser-Lys-Tyr-Leu-Asp-Ser-Arg-Arg-Ala-Lys-Asp-Phe-Val-Glu-Trp-Leu-Met-Xaa-Xaa-R (SEQ ID NO: 111)

[0725] NH₂-His-Ser-Gln-Gly-Thr-Phe-Thr-Ser-Asp-Tyr-Ser-Lys-Tyr-Leu-Asp-Ser-Arg-Arg-Ala-Gln-Asp-Phe-Val-Glu-Trp-Leu-Met-Lys-Xaa-R (SEQ ID NO: 112)

[0726] NH₂-His-Ser-Gln-Gly-Thr-Phe-Thr-Ser-Asp-Tyr-Ser-Lys-Tyr-Leu-Asp-Glu-Arg-Arg-Ala-Lys-Asp-Phe-Val-Glu-Trp-Leu-Met-Asn-Thr-R (SEQ ID NO: 104)

[0727] NH₂-His-Ser-Gln-Gly-Thr-Phe-Thr-Ser-Asp-Tyr-Ser-Lys-Tyr-Leu-Asp-Glu-Arg-Arg-Ala-Gln-Asp-Phe-Val-Glu-Trp-Leu-Met-Lys-Thr-R (SEQ ID NO: 105)

[0728] NH₂-His-Ser-Gln-Gly-Thr-Phe-Thr-Ser-Asp-Tyr-Ser-Lys-Tyr-Leu-Asp-Glu-Arg-Arg-Ala-Lys-Asp-Phe-Val-Glu-Trp-Leu-Met-Lys-Thr-R (SEQ ID NO: 106)

wherein Xaa at position 28=Asp, or Asn, the Xaa at position 29 is Thr or Gly, R is selected from the group consisting of COOH, CONH₂, glutamic acid, aspartic acid, glycine, SEQ ID NO: 78, SEQ ID NO: 117 and SEQ ID NO: 118, and a lactam bridge is formed between Lys at position 12 and Glu at position 16 for SEQ ID NO: 109, between Glu at position 16 and Lys at position 20 for SEQ ID NO: 110, between Lys at position 20 and Glu at position 24 for SEQ ID NO: 111, between Glu at position 24 and Lys at position 28 for SEQ ID NO: 112, between Lys at position 12 and Glu at position 16 and between Lys at position 20 and Glu at position 24 for SEQ ID NO: 104, between Lys at position 12 and Glu at position 16 and between Glu at position 24 and Lys at position 28 for SEQ ID NO: 105 and between Glu at position 16 and Lys at position 20 and between Glu at position 24 and Lys at position 28 for SEQ ID NO: 106. In some embodiments R is selected from the group consisting of COOH, CONH₂, glutamic acid, aspartic acid, glycine, the amino acid at position 28 is Asn, and the amino acid at position 29 is threonine. In some embodiments R is CONH₂, the amino acid at position 28 is Asn and the amino acid at position 29 is threonine. In another embodiment R is selected from the group consisting of SEQ ID NO: 78, SEQ ID NO: 79 and SEQ ID NO: 80 and the amino acid at position 29 is glycine.

[0729] In a further embodiment the glucagon/GLP-1 receptor co-agonist is selected from the group consisting of SEQ ID NO: 99, SEQ ID NO: 100, SEQ ID NO: 101, SEQ ID NO: 102, SEQ ID NO: 103, SEQ ID NO: 104, SEQ ID NO: 105 and SEQ ID NO: 106, wherein the peptide further comprises an additional carboxy terminal extension of one amino acid or a peptide selected from the group consisting of SEQ ID NO: 78, SEQ ID NO: 117 and SEQ ID NO: 118. In some embodiments the terminal extension comprises the sequence of SEQ ID NO: 78, SEQ ID NO: 79 or SEQ ID NO: 80 and the glucagon related peptide comprises the sequence of SEQ ID NO: 72. In some embodiments the glucagon/GLP-1 receptor co-agonist comprises the sequence of SEQ ID NO: 81 wherein the amino acid at position 16 is glutamic acid, the amino acid at position 20 is lysine, the amino acid at position 28 is asparagine and the amino acid sequence of SEQ ID No: 78 or SEQ ID NO: 79 is linked to the carboxy terminus of SEQ ID NO: 81.

[0730] In the embodiment wherein a single amino acid is added to the carboxy terminus of SEQ ID NO: 108, the amino acid is typically selected from one of the 20 common amino acids, and in some embodiments the amino acid has an amide group in place of the carboxylic acid of the native amino acid. In some embodiments the additional amino acid is selected from the group consisting of glutamic acid and aspartic acid and glycine. In the embodiments wherein the glucagon agonist analog further comprises a carboxy terminal extension, the carboxy terminal amino acid of the extension, in some embodiments, ends in an amide group or an ester group rather than a carboxylic acid.

[0731] In another embodiment the glucagon/GLP-1 receptor co-agonist comprises the sequence: NH₂-His-Ser-Gln-Gly-Thr-Phe-Thr-Ser-Asp-Tyr-Ser-Lys-Tyr-Leu-Asp-Glu-Arg-Arg-Ala-Gln-Asp-Phe-Val-Gln-Trp-Leu-Met-Asn-Thr-Xaa-CONH₂ (SEQ ID NO: 107), wherein the Xaa at position 30 represents any amino acid. In some embodiments Xaa is selected from one of the 20 common amino acids, and in some embodiments the amino acid is glutamic acid, aspartic acid or glycine. The solubility of this peptide can be further improved by covalently linking a PEG chain to the side chain of amino acid at position 17, 21, 24 or 30 of SEQ ID NO: 107. In a further embodiment the peptide comprises an additional carboxy terminal extension of a peptide selected from the group consisting of SEQ ID NO: 78, SEQ ID NO: 117 and SEQ ID NO: 118. In accordance with some embodiments the glucagon/GLP-1 receptor co-agonist comprises the sequence of SEQ ID NO: 129, SEQ ID NO: 130 and SEQ ID NO: 131.

[0732] Additional site specific modifications internal to the glucagon sequence of SEQ ID NO: 99, SEQ ID NO: 100, SEQ ID NO: 101, SEQ ID NO: 102, SEQ ID NO: 103, SEQ ID NO: 104, SEQ ID NO: 105, SEQ ID NO: 106, SEQ ID NO: 107 and SEQ ID NO: 121 can be made to yield a set of glucagon agonists that possess variable degrees of GLP-1 agonism. Accordingly, peptides that possess virtually identical in vitro potency at each receptor have been prepared and characterized. Similarly, peptides with tenfold selectively enhanced potency at each of the two receptors have been identified and characterized. As noted above substitution of the serine residue at position 16 with glutamic acid enhances the potency of native glucagon at both the Glucagon and GLP-1 receptors, but maintains approximately a tenfold selectivity for the glucagon receptor. In addition by substituting the native glutamine at position 3 with glutamic acid (SEQ ID NO: 128) generates a glucagon analog that exhibits approximately a tenfold selectivity for the GLP-1 receptor.

[0733] The solubility of the glucagon/GLP-1 co-agonist peptides can be further enhanced in aqueous solutions at physiological pH, while retaining the high biological activity relative to native glucagon by the introduction of hydrophilic groups at positions 16, 17, 21, and 24 of the peptide, or by the addition of a single modified amino acid (i.e., an amino acid modified to comprise a hydrophilic group) at the carboxy terminus of the glucagon/GLP-1 co-agonist peptide. In accordance with some embodiments the hydrophilic group comprises a polyethylene (PEG) chain. More particularly, in some embodiments the glucagon peptide comprises the sequence of SEQ ID NO: 98, SEQ ID NO: 99, SEQ ID NO: 100, SEQ ID NO: 101, SEQ ID NO: 102, SEQ ID NO: 103, SEQ ID NO: 104, SEQ ID NO: 105 or SEQ ID NO: 106 wherein a PEG chain is covalently linked to the side chain of an amino acids at position 16, 17, 21, 24, 29 or the C-terminal amino acid of the glucagon peptide, with the proviso that when the peptide comprises SEQ ID NO: 98, SEQ ID NO: 99, SEQ ID NO: 100 or SEQ ID NO: 101 the polyethylene glycol chain is covalently bound to an amino acid residue at position 17, 21 or 24, when the peptide comprises SEQ ID NO: 102 or SEQ ID NO: 103 the polyethylene glycol chain is covalently bound to an amino acid residue at position 16, 17 or 21, and when the peptide comprises SEQ ID NO: 104, SEQ ID NO: 105 or SEQ ID NO: 106 the polyethylene glycol chain is covalently bound to an amino acid residue at position 17 or 21.

[0734] In some embodiments the glucagon peptide comprises the sequence of SEQ ID NO: 99, SEQ ID NO: 100 or SEQ ID NO: 101, wherein a PEG chain is covalently linked to the side chain of an amino acids at position 17, 21, 24, or the C-terminal amino acid of the glucagon peptide, and the carboxy terminal amino acid of the peptide has an amide group in place of the carboxylic acid group of the native amino acid. In some embodiments the glucagon/GLP-1 receptor co-agonist peptide comprises a sequence selected from the group consisting of SEQ ID NO: 100, SEQ ID NO: 101, SEQ ID NO: 102, SEQ ID NO: 103, SEQ ID NO: 104, SEQ ID NO: 105, SEQ ID NO: 106 and SEQ ID NO: 107, wherein a PEG chain is covalently linked to the side chain of an amino acid at position 17, 21 or 24 of SEQ ID NO: 100, SEQ ID NO: 101 and SEQ ID NO: 107, or at position 16, 17 or 21 of SEQ ID NO: 102 and SEQ ID NO: 103 or at position 17 or 21 of SEQ ID NO: 104, SEQ ID NO: 105 and SEQ ID NO: 106 of the glucagon peptide. In another embodiment the glucagon/GLP-1 receptor co-agonist peptide comprises the sequence of SEQ ID NO: 99 or SEQ ID NO: 107, wherein a PEG chain is covalently linked to the side chain of an amino acids at position 17, 21 or 24 or the C-terminal amino acid of the glucagon peptide.

[0735] In some embodiments a glucagon peptide selected from the group consisting of SEQ ID NO: 100, SEQ ID NO: 101, SEQ ID NO: 102, SEQ ID NO: 103, SEQ ID NO: 104, SEQ ID NO: 105, SEQ ID NO: 106, and SEQ ID NO: 107 is further modified to comprise a PEG chain covalently linked to the side chain of an amino acid at position 17 or 21 of the glucagon peptide. In some embodiments the pegylated glucagon/GLP-1 receptor co-agonist further comprises the sequence of SEQ ID NO: 78, SEQ ID NO: 117 or SEQ ID NO: 79.

[0736] In another embodiment the glucagon related peptide comprises the sequence of SEQ ID NO: 72 or SEQ ID NO: 120, further comprising a C-terminal extension of SEQ ID NO: 78, SEQ ID NO: 79 or SEQ ID NO: 80 linked to the C-terminal amino acid of SEQ ID NO: 72 or SEQ ID NO: 120, and optionally further comprising a PEG chain covalently linked to the side chain of an amino acids at position 17, 18, 21, 24 or 29 or the C-terminal amino acid of the peptide. In another embodiment the glucagon related peptide comprises the sequence of SEQ ID NO: 72 or SEQ ID NO: 120, wherein a PEG chain is covalently linked to the side chain of an amino acids at position 21 or 24 of the glucagon related peptide and the peptide further comprises a C-terminal extension of SEQ ID NO: 78, or SEQ ID NO: 79.

[0737] In another embodiment the glucagon related peptide comprises the sequence of SEQ ID NO: 72, or SEQ ID NO: 81 or SEQ ID NO: 82, wherein an additional amino acid is added to the carboxy terminus of SEQ ID NO: 81 or SEQ ID NO: 82, and a PEG chain is covalently linked to the side chain of the added amino acid. In a further embodiment, the pegylated glucagon analog further comprises a C-terminal extension of SEQ ID NO: 78 or SEQ ID NO: 79 linked to the C-terminal amino acid of SEQ ID NO: 81 or SEQ ID NO: 82. In another embodiment the glucagon related peptide comprises the sequence of SEQ ID NO: 107, wherein a PEG chain is covalently linked to the side chain of the amino acid at position 30 of the glucagon related peptide and the peptide further comprises a C-terminal extension of SEQ ID NO: 78 or SEQ ID NO: 79 linked to the C-terminal amino acid of SEQ ID NO: 107.

[0738] The polyethylene glycol chain may be in the form of a straight chain or it may be branched. In accordance with some embodiments the polyethylene glycol chain has an average molecular weight selected from the range of about 500 to about 10,000 Daltons. In some embodiments the polyethylene glycol chain has an average molecular weight selected from the range of about 1,000 to about 5,000 Daltons. In an alternative embodiment the polyethylene glycol chain has an average molecular weight selected from the range of about 10,000 to about 20,000 Daltons. In accordance with some embodiments the pegylated glucagon related peptide comprises two or more polyethylene glycol chains covalently bound to the glucagon related peptide wherein the total molecular weight of the glucagon chains is about 1,000 to about 5,000 Daltons. In some embodiments the pegylated glucagon agonist comprises a peptide consisting of SEQ ID NO: 93 or a glucagon agonist analog of SEQ ID NO: 93, wherein a PEG chain is covalently linked to the amino acid residue at position 21 and at position 24, and wherein the combined molecular weight of the two PEG chains is about 1,000 to about 5,000 Daltons.

[0739] In certain exemplary embodiments, the glucagon peptide comprises the amino acid sequence of SEQ ID NO: 701 with up to ten amino acid modifications and comprises an amino acid at position 10 which is acylated or alkylated. In some embodiments, the amino acid at position 10 is acylated or alkylated with a C4 to C30 fatty acid. In certain aspects, the amino acid at position 10 comprises an acyl group or an alkyl group which is non-native to a naturally-occurring amino acid.

[0740] In certain embodiments, the glucagon peptide comprising an amino acid at position 10 which is acylated or alkylated comprises a stabilized alpha helix. Accordingly, in certain aspects, the glucagon peptide comprises an acyl or alkyl group as described herein and an intramolecular bridge, e.g., a covalent intramolecular bridge (e.g., a lactam bridge) between the side chains of an amino acid at position i and an amino acid at position i+4, wherein i is 12, 16, 20, or 24. Alternatively or additionally, the glucagon peptide comprises an acyl or alkyl group as described herein and one, two, three or more of positions 16, 20, 21 and/or 24 of the glucagon peptide are substituted with an α,α-disubstituted amino acid, e.g., AIB. In some instances, the non-native glucagon peptide comprises Glu at position 16 and Lys at position 20, wherein optionally a lactam bridge links the Glu and the Lys, and, optionally, the glucagon peptide further comprises one or more modifications selected from the group consisting of: Gln at position 17, Ala at position 18, Glu at position 21, Ile at position 23, and Ala at position 24.

[0741] Also, in any of the embodiments, wherein the glucagon related peptide comprises an amino acid at position 10 which is acylated or alkylated, the glucagon related peptide can further comprise a C-terminal amide in lieu of the C-terminal alpha carboxylate.

[0742] In some embodiments, the glucagon related peptide comprising an acyl or alkyl group as described herein further comprises an amino acid substitution at position 1, at position 2, or at positions 1 and 2, wherein the amino acid substitution(s) achieve DPP-IV protease resistance. In certain specific embodiments, the glucagon related peptide is one which comprises SEQ ID NOs: 72 with an amino acid at position 10 acylated or alkylated as described herein. The acyl or alkyl group of these embodiments may be any acyl or alkyl group described herein. For example, the acyl group may be a C4 to C30 (e.g., C8 to C24) fatty acyl group and the alkyl group may be a C4 to C30 (e.g., C8 to C24) alkyl group.

[0743] The amino acid to which the acyl or alkyl group is attached may be any of the amino acids described herein, e.g., an amino acid of any of Formula I (e.g., Lys), Formula II, and Formula III.

[0744] In some embodiments, the acyl group or alkyl group is directly attached to the amino acid at position 10. In some embodiments, the acyl or alkyl group is attached to the amino acid at position 10 via a spacer, such as, for example, a spacer which is 3 to 10 atoms in length, e.g., an amino acid or dipeptide. Suitable spacers for purposes of attaching an acyl or alkyl group are described herein.

[0745] In certain aspects, the glucagon analogs comprise at least one amino acid modification and up to 15 amino acid modifications (e.g., 1, 2, 3, 4, 5, 6, 7, 8, 9, 10, 11, 12, 13, 14, 15 amino acid modifications), or up to 10 amino acid modifications. In certain embodiments, the analogs comprising at least one amino acid modification and up to 10 amino acid modifications represent conservative amino acid modifications. Conservative amino acid modifications are described herein.

[0746] Accordingly, in some aspects, the glucagon analog comprises the amino acid sequence of SEQ ID NO: 701 with one or more of: Gln at position 17, Ala at position 18, Glu at position 21, Ile at position 23, and Ala or Cys at position 24, or conservative amino acid substitutions thereof. In some aspects, the analog comprises a C-terminal amide in place of the C-terminal alpha carboxylate. In certain embodiments, the analog comprises an amino acid substitution at position 1, position 2, or positions 1 and 2, which substitution(s) achieve DPP-IV protease resistance. Suitable amino acid substitutions are described herein. For example, DMIA at position 1 and/or d-Ser or AIB at position 2. In some embodiments, the amino acid at position 2 is not D-serine.

[0747] Additionally or alternatively, the analog may comprise one or a combination of: (a) Ser at position 2 substituted with Ala; (b) Gln at position 3 substituted with Glu or a glutamine analog; (c) Thr at position 7 substituted with a Ile; (d) Tyr at position 10 substituted with Trp or an amino acid comprising an acyl or alkyl group which is non-native to a naturally-occurring amino acid; (e) Lys at position 12 substituted with Ile; (f) Asp at position 15 substituted with Glu; (g) Ser at position 16 substituted with Glu; (h) Gln at position 20 substituted with Ser, Thr, Ala, AIB; (i) Gln at position 24 substituted with Ser, Thr, Ala, AIB; (j) Met at position 27 substituted with Leu or Nle; (k) Asn at position 29 substituted with a charged amino acid, optionally, Asp or Glu; and (1) Thr at position 29 substituted with Gly or a charged amino acid, optionally, Asp or Glu. In certain aspects, the analog comprises the amino acid sequence of any of SEQ ID NOs: 657-669.

[0748] With regard to the analogs which exhibit agonist activity at the GIP receptor, the analog comprises an extension of 1-21 amino acids (e.g., 5-19, 7-15, 9-12 amino acids). The extension of the analog may comprise any amino acid sequence, provided that the extension is 1 to 21 amino acids. In some aspects, the extension is 7 to 15 amino acids and in other aspects, the extension is 9 to 12 amino acids. In some embodiments, the extension comprises (i) the amino acid sequence of SEQ ID NO: 78 or 674, (ii) an amino acid sequence which has high sequence identity (e.g., at least 80%, 85%, 90%, 95%, 98%, 99%) with the amino acid sequence of SEQ ID NO: 78 or 674, or (iii) the amino acid sequence of (i) or (ii) with one or more conservative amino acid modifications.

[0749] In some embodiments, at least one of the amino acids of the extension is acylated or alkylated. The amino acid comprising the acyl or alkyl group may be located at any position of extension of the analog. In certain embodiments, the acylated or alkylated amino acid of the extension is located at one of positions 37, 38, 39, 40, 41, or 42 (according to the numbering of SEQ ID NO: 701) of the analog. In certain embodiments, the acylated or alkylated amino acid is located at position 40 of the analog.

[0750] In exemplary embodiments, the acyl or alkyl group is an acyl or alkyl group which is non-native to a naturally-occurring amino acid. For example, the acyl or alkyl group may be a C4 to C30 (e.g., C12 to C18) fatty acyl group or C4 to C30 (e.g., C12 to C18) alkyl. The acyl or alkyl group may be any of those discussed herein.

[0751] In some embodiments, the acyl or alkyl group is attached directly to the amino acid, e.g., via the side chain of the amino acid. In other embodiments, the acyl or alkyl group is attached to the amino acid via a spacer (e.g., an amino acid, a dipeptide, a tripeptide, a hydrophilic bifunctional spacer, a hydrophobic bifunctional spacer). In certain aspects, the spacer is 3 to 10 atoms in length. In some embodiments, the amino acid spacer is not γ-Glu. In some embodiments, the dipeptide spacer is not γ-Glu-γ-Glu.

[0752] Also, in exemplary embodiments, the amino acid to which the acyl or alkyl group is attached may be any of those described herein, including, for example, an amino acid of Formula I, II, or III. The amino acid which is acylated or alkylated may be a Lys, for example. Suitable amino acids comprising an acyl or alkyl group, as well as suitable acyl groups and alkyl groups, are described herein. See, for example, the teachings under the sections entitled Acylation and Alkylation.

[0753] In other embodiments, 1-6 amino acids (e.g., 1-2, 1-3, 1-4, 1-5 amino acids) of the extension are positive-charged amino acids, e.g., amino acids of Formula IV, such as, for example, Lys. As used herein, the term “positive-charged amino acid” refers to any amino acid, naturally-occurring or non-naturally occurring, comprising a positive charge on an atom of its side chain at a physiological pH. In certain aspects, the positive-charged amino acids are located at any of positions 37, 38, 39, 40, 41, 42, and 43. In specific embodiments, a positive-charged amino acid is located at position 40. In other instances, the extension is acylated or alkylated as described herein and comprises 1-6 positive charged amino acids as described herein.

[0754] In yet other embodiments, the analogs which exhibit agonist activity at the GIP receptor comprises (i) SEQ ID NO: 701 with at least one amino acid modification, (ii) an extension of 1 to 21 amino acids (e.g., 5 to 18, 7 to 15, 9 to 12 amino acids)C-terminal to the amino acid at position 29 of the analog, and (iii) an amino acid comprising an acyl or alkyl group which is non-native to a naturally-occurring amino acid which is located outside of the C-terminal extension (e.g., at any of positions 1-29). In some embodiments, the analog comprises an acylated or alkylated amino acid at position 10. In particular aspects, the acyl or alkyl group is a C4 to C30 fatty acyl or C4 to C30 alkyl group. In some embodiments, the acyl or alkyl group is attached via a spacer, e.g., an amino acid, dipeptide, tripeptide, hydrophilic bifunctional spacer, hydrophobic bifunctional spacer). In certain aspects, the analog comprises an amino acid modification which stabilizes the alpha helix, such as a salt bridge between a Glu at position 16 and a Lys at position 20, or an alpha, alpha-disubstituted amino acid at any one, two, three, or more of positions 16, 20, 21, and 24. In specific aspects, the analog additionally comprises amino acid modifications which confer DPP-IV protease resistance, e.g., DMIA at position 1, AIB at position 2. Analogs comprising further amino acid modifications are contemplated herein. In one embodiment the Class 3 glucagon related peptide comprises the structures of any of SEQ ID NOs: 657-669.

[0755] In accordance with some embodiments, the Class 3 glucagon related peptide comprises the amino acid sequence of native glucagon (SEQ ID NO: 701) comprising the following modifications: AIB at position 2, Glu at position 3, Lys at position 10, Glu at position 16, Gln at position 17, Ala at position 18, Lys at position 20, Glu at position 21, Ile at position 23, Ala at position 24; wherein Lys at position 10 is acylated with a C14 or C16 fatty acid, and wherein the C-terminal carboxylate is replaced with an amide. In a specific embodiment, this Class 3 glucagon related peptide is attached via its N-terminal amino acid to the dipeptide D-Lys-Sarcosine.

[0756] In accordance with some embodiments, the Class 3 glucagon related peptide comprises, consists essentially of, or consists of an amino acid sequence of any of SEQ ID NOs: 514, 517-534, or 554, optionally with up to 1, 2, 3, 4, or 5 further modifications that retain GLP-1 agonist and/or glucagon agonist activity. In certain embodiments, the Class 3 glucagon related peptide comprises the amino acids of any of SEQ ID NOs: 562-684, and 1701-1776. In some embodiments, the Class 3 glucagon related peptide comprises the amino acid sequences of any of SEQ ID NOs: 1801-1908.

[0757] The disclosed glucagon related peptide-insulin peptide conjugates are believed to be suitable for any use that has previously been described for insulin peptides. Accordingly, the glucagon related peptide-insulin conjugates described herein can be used to treat hyperglycemia, or treat other metabolic diseases that result from high blood glucose levels. Accordingly, the present invention encompasses pharmaceutical compositions comprising a glucagon related peptide-insulin conjugate as disclosed herein and a pharmaceutically acceptable carrier for use in treating a patient suffering from high blood glucose levels. In accordance with one embodiment the patient to be treated using a glucagon related peptide-insulin conjugate disclosed herein is a domesticated animal, and in another embodiment the patient to be treated is a human.

[0758] One method of treating hyperglycemia in accordance with the present disclosure comprises the steps of administering the presently disclosed glucagon related peptide-insulin conjugate to a patient using any standard route of administration, including parenterally, such as intravenously, intraperitoneally, subcutaneously or intramuscularly, intrathecally, transdermally, rectally, orally, nasally or by inhalation. In one embodiment the composition is administered subcutaneously or intramuscularly. In one embodiment, the composition is administered parenterally and the glucagon related peptide-insulin conjugate is prepackaged in a syringe.

[0759] The glucagon related peptide-insulin conjugate disclosed herein may be administered alone or in combination with other anti-diabetic agents. Anti-diabetic agents known in the art or under investigation include native insulin, native glucagon and functional analogs thereof, sulfonylureas, such as tolbutamide (Orinase), acetohexamide (Dymelor), tolazamide (Tolinase), chlorpropamide (Diabinese), glipizide (Glucotrol), glyburide (Diabeta, Micronase, Glynase), glimepiride (Amaryl), or gliclazide (Diamicron); meglitinides, such as repaglinide (Prandin) or nateglinide (Starlix); biguanides such as metformin (Glucophage) or phenformin; thiazolidinediones such as rosiglitazone (Avandia), pioglitazone (Actos), or troglitazone (Rezulin), or other PPARy inhibitors; alpha glucosidase inhibitors that inhibit carbohydrate digestion, such as miglitol (Glyset), acarbose (Precose/Glucobay); exenatide (Byetta) or pramlintide; Dipeptidyl peptidase-4 (DPP-4) inhibitors such as vildagliptin or sitagliptin; SGLT (sodium-dependent glucose transporter 1) inhibitors; or FBPase (fructose 1,6-bisphosphatase) inhibitors.

[0760] Pharmaceutical compositions comprising the glucagon related peptide-insulin conjugates disclosed herein can be formulated and administered to patients using standard pharmaceutically acceptable carriers and routes of administration known to those skilled in the art. Accordingly, the present disclosure also encompasses pharmaceutical compositions comprising one or more of the glucagon related peptide-insulin conjugates disclosed herein or a pharmaceutically acceptable salt thereof, in combination with a pharmaceutically acceptable carrier. In one embodiment the pharmaceutical composition comprises a 1 mg/ml concentration of the glucagon related peptide-insulin conjugate at a pH of about 4.0 to about 7.0 in a phosphate buffer system. The pharmaceutical compositions may comprise the glucagon related peptide-insulin conjugate as the sole pharmaceutically active component, or the glucagon related peptide-insulin conjugate peptide can be combined with one or more additional active agents.

[0761] All therapeutic methods, pharmaceutical compositions, kits and other similar embodiments described herein contemplate that glucagon related peptide-insulin conjugate peptides include all pharmaceutically acceptable salts thereof.

[0762] In one embodiment the kit is provided with a device for administering the glucagon related peptide-insulin conjugate to a patient. The kit may further include a variety of containers, e.g., vials, tubes, bottles, and the like. Preferably, the kits will also include instructions for use. In accordance with one embodiment the device of the kit is an aerosol dispensing device, wherein the composition is prepackaged within the aerosol device. In another embodiment the kit comprises a syringe and a needle, and in one embodiment the glucagon related peptide-insulin conjugate composition is prepackaged within the syringe.

[0763] The compounds of this invention may be prepared by standard synthetic methods, recombinant DNA techniques, or any other methods of preparing peptides and fusion proteins. Although certain non-natural amino acids cannot be expressed by standard recombinant DNA techniques, techniques for their preparation are known in the art. Compounds of this invention that encompass non-peptide portions may be synthesized by standard organic chemistry reactions, in addition to standard peptide chemistry reactions when applicable.

[0764] In accordance with embodiment 1, an insulin agonist/incretin conjugate comprising a glucagon related peptide and an insulin peptide is provided, wherein the glucagon related peptide is linked either directly or through a linker to the insulin peptide. In embodiment 2, the conjugate of embodiment 1 has the C-terminal region of the glucagon related peptides covalently linked to the insulin peptide through a position independently selected from the side chain of an amino acid at a position selected from the group consisting of A9, A14 and A15 of the A chain, positions B1, B2, B10, B22, B28 or B29 of the B chain, the N-terminal alpha amine of the B chain, the carboxy terminus of the B chain and at the side chain of an amino acid at any position of a linking moiety that links the A chain and B chain of a single chain insulin analog. In embodiment 3, embodiment 1 or 2 has the carboxy terminus of the glucagon related peptide covalently linked to the amino terminus of the B chain of the insulin peptide. In embodiment 4, the conjugate of any one of embodiments 1-3 comprises the insulin peptide as a single chain insulin analog. In embodiment 5 the conjugate of any of embodiments 1-4 comprises a single chain insulin analog wherein a glucagon related peptide is linked to the amino acid side chain of an amino acid of the linking moiety that links the A chain and B chain of the single chain insulin analog. In embodiment 6 the conjugate of any of embodiments 1-4 comprises a two chain insulin analog and said conjugate comprises a first and second glucagon related peptide wherein each glucagon related peptide is independently covalently linked to the insulin peptide at a position selected from the group consisting of the amino terminus of the B chain, the carboxy terminus of the A chain, and the carboxy terminus of the B chain.

[0765] In embodiment 7 the conjugate of any one of embodiment 1-6 is provided wherein the glucagon related peptide comprises

[0766] (i) the amino acid sequence:
[0767] X1-X2-Gln-Gly-Thr-Phe-Thr-Ser-Asp-Tyr-Ser-Lys-Tyr-Leu-Asp-Ser-Arg-Arg-Ala-Gln-Asp-Phe-Val-Gln-Trp-Leu-Met-Z (SEQ ID NO: 839) with 1 to 3 amino acid modifications thereto, wherein
[0768] X1 and/or X2 is a non-native (relative to SEQ ID NO: 701) amino acid that reduces susceptibility of the glucagon related peptide to cleavage by dipeptidyl peptidase IV (DPP-IV),
[0769] Z is selected from the group consisting of Asn-Thr-COOH, and Y—COOH, wherein Y is 1 to 2 amino acids, and further wherein
[0770] (1) a lactam bridge connects the side chains of an amino acid at position i and an amino acid at position i+4, wherein i is 12, 16, 20 or 24 or
[0771] (2) one, two, three, or all of the amino acids at positions 16, 20, 21, and 24 of the glucagon related peptide is substituted with an α,α-disubstituted amino acid;

[0772] and said glucagon related peptide has glucagon agonist activity;

[0773] (ii) the amino acid sequence of SEQ ID NO: 701 modified to comprise at least one amino acid modification selected from the group consisting of:
[0774] substitution of Asn at position 28 with a charged amino acid;
[0775] substitution of Asn at position 28 with a charged amino acid selected from the group consisting of Asp, Glu, cysteic acid, and homocysteic acid;
[0776] substitution at position 28 with Asn, Asp, or Glu;
[0777] substitution at position 28 with Glu;
[0778] substitution of Thr at position 29 with a charged amino acid;
[0779] substitution of Thr at position 29 with a charged amino acid selected from the group consisting of Lys, Arg, His, Asp, Glu, cysteic acid, and homocysteic acid;
[0780] substitution at position 29 with Asp, Glu, or Lys;
[0781] substitution at position 29 with Glu;
[0782] insertion of 1-3 charged amino acids after position 29;
[0783] insertion after position 29 of Glu or Lys;
[0784] insertion after position 29 of Gly-Lys or Lys-Lys; or a combination thereof;
[0785] and at least one amino acid modification selected from Group A or Group B, or a combination thereof;

[0786] wherein Group A is an amino acid modification selected from the group consisting of substitution of Ser at position 16 with Thr or AIB; and

[0787] wherein Group B is an amino acid modification selected from the group consisting of:

[0788] substitution of His at position 1 with a non-native amino acid that reduces susceptibility of the glucagon related peptide to cleavage by dipeptidyl peptidase IV (DPP-IV),

[0789] substitution of Ser at position 2 with a non-native amino acid that reduces susceptibility of the glucagon related peptide to cleavage by dipeptidyl peptidase IV (DPP-IV),

[0790] substitution of Tyr at position 10 with Phe or Val;

[0791] substitution of Lys at position 12 with Arg;

[0792] substitution of Gln at position 20 with Ala or AIB;

[0793] substitution of Asp at position 21 with Glu;

[0794] substitution of Gln at position 24 with Ala or AIB;

[0795] substitution of Met at position 27 with Leu or Nle;

[0796] or a combination thereof;

[0797] and wherein said glucagon related peptide has glucagon agonist activity;

[0798] (iii) a glucagon related peptide of SEQ ID NO: 701, modified to comprise
[0799] (a) an amino acid modification at position 1 that confers GIP agonist activity,
[0800] (b) (1) a lactam bridge between the side chains of amino acids at positions i and i+4 or between the side chains of amino acids at positions j and j+3, wherein i is 12, 13, 16, 17, 20 or 24, and wherein j is 17, or
   [0801] (2) one, two, three, or all of the amino acids at positions 16, 20, 21, and 24 of the analog is substituted with an α,α-disubstituted amino acid,
[0802] (c) amino acid modifications at one, two or all of positions 27, 28 and 29, and
[0803] (d) 1-6 further amino acid modifications,

[0804] wherein the EC50 of the analog for GIP receptor activation is about 10 nM or less;

[0805] (iv) the sequence of SEQ ID NO: 72 or an analog of SEQ ID NO: 72, wherein said analog differs from SEQ ID NO: 72 by 1 to 3 amino acid modifications, selected from positions 1, 2, 3, 5, 7, 10, 11, 13, 14, 17, 18, 19, 21, 24, 27, 28, and 29, wherein said glucagon related peptide exhibits at least 20% of the activity of native GLP-1 at the GLP-1 receptor;

[0806] (v) an amino acid that differs from SEQ ID NO: 701 by no more than ten amino acid modifications, comprising one or more amino acid substitutions with AIB at positions 16, 20, 21, and/or 24, and an amino acid modification at position 1 and/or 2 that provides reduced susceptibility to cleavage by dipeptidyl peptidase IV, wherein said glucagon related peptide exhibits at least 20% of the activity of native GLP-1 at the GLP-1 receptor;

[0807] In embodiment 8 the conjugate of any one of embodiment 1-7 is provided wherein said insulin peptide comprises an A chain and a B chain wherein said A chain comprises a sequence GIVX₄X₅CCX₈X₉X₁₀CX₁₂LX₁₄X₁₅LX₁₇X₁₈YCX₂₁-R₁₃ (SEQ ID NO: 19), and said B chain comprises a sequence R₂₂-X₂₅LCGX₂₉X₃₀LVX₃₃X₃₄LYLVCGX₄₁X₄₂GFX₄₅ (SEQ ID NO: 20), wherein

[0808] X₄ is glutamic acid or aspartic acid;

[0809] X₅ is glutamine or glutamic acid

[0810] X₈ is histidine, threonine or phenylalanine;

[0811] X₉ is serine, arginine, lysine, ornithine or alanine;

[0812] X₁₀ is isoleucine or serine;

[0813] X₁₂ is serine or aspartic acid;

[0814] X₁₄ is tyrosine, arginine, lysine, ornithine or alanine;

[0815] X₁₅ is glutamine, glutamic acid, arginine, alanine, lysine, ornithine or leucine;

[0816] X₁₇ is glutamic acid, aspartic acid, asparagine, lysine, ornithine or glutamine;

[0817] X₁₈ is methionine, asparagine, glutamine, aspartic acid, glutamic acid or threonine;

[0818] X₂₁ is selected from the group consisting of alanine, glycine, serine, valine, threonine, isoleucine, leucine, glutamine, glutamic acid, asparagine, aspartic acid, histidine, tryptophan, tyrosine, and methionine;

[0819] X₂₅ is histidine or threonine;

[0820] X₂₉ is selected from the group consisting of alanine, glycine and serine;

[0821] X₃₀ is selected from the group consisting of histidine, aspartic acid, glutamic acid, homocysteic acid and cysteic acid;

[0822] X₃₃ is selected from the group consisting of aspartic acid and glutamic acid;

[0823] X₃₄ is selected from the group consisting of alanine and threonine;

[0824] X₄₁ is selected from the group consisting of glutamic acid, aspartic acid or asparagine;

[0825] X₄₂ is selected from the group consisting of alanine, ornithine, lysine and arginine;

[0826] X₄₅ is tyrosine or phenylalanine;

[0827] R₂₂ is selected from the group consisting of AYRPSE (SEQ ID NO: 14), FVNQ (SEQ ID NO: 12), PGPE (SEQ ID NO: 11), a tripeptide glycine-proline-glutamic acid, a tripeptide valine-asparagine-glutamine, a dipeptide proline-glutamic acid, a dipeptide asparagine-glutamine, glutamine, glutamic acid and an N-terminal amine; and

[0828] R₁₃ is COOH or CONH₂.

[0829] In embodiment 9 the conjugate of any one of embodiments 1-7 is provided wherein said A chain comprises the sequence GIVEQCCX₈X₉ICSLYQLENYCX₂₁-R₁₃ (SEQ ID NO: 73) said B chain comprises the sequence R₂₂-X₂₅LCGX₂₉X₃₀LVX₃₃X₃₄LYLVCGX₄₁X₄₂GFX₄₅ (SEQ ID NO: 20)

[0830] X₈ is histidine or threonine;

[0831] X₉ is serine, lysine, or alanine;

[0832] X₂₁ is alanine, glycine or asparagine;

[0833] X₂₅ is histidine or threonine;

[0834] X₂₉ is selected from the group consisting of alanine, glycine and serine;

[0835] X₃₀ is selected from the group consisting of histidine, aspartic acid, glutamic acid, homocysteic acid and cysteic acid;

[0836] X₃₃ is selected from the group consisting of aspartic acid and glutamic acid;

[0837] X₃₄ is selected from the group consisting of alanine and threonine;

[0838] X₄₁ is selected from the group consisting of glutamic acid, aspartic acid or asparagine;

[0839] X₄₂ is selected from the group consisting of alanine, ornithine, lysine and arginine;

[0840] X₄₅ is tyrosine or phenylalanine;

[0841] R₂₂ is selected from the group consisting of FVNQ (SEQ ID NO: 12), a tripeptide valine-asparagine-glutamine, a dipeptide asparagine-glutamine, glutamine and an N-terminal amine; and

[0842] R₁₃ is COOH or CONH₂.

[0843] In embodiment 10 the conjugate of any one of embodiments 1-7 is provided wherein said A chain comprises a sequence GIVDECCX₈X₉SCDLRRLEMX₁₉CX₂₁-R₁₃ (SEQ ID NO: 74) and said B chain comprises a sequence R₂₂-X₂₅LCGAX₃₀LVDALYLVCGDX₄₂GFY (SEQ ID NO: 75), wherein

[0844] X₈ is phenylalanine or histidine;

[0845] X₉ is arginine, ornithine or alanine;

[0846] X₁₉ is tyrosine, 4-methoxy-phenylalanine or 4-amino-phenylalanine;

[0847] X₂₁ is alanine or asparagine;

[0848] X₂₅ is histidine or threonine;

[0849] X₃₀ is selected from the group consisting of histidine, aspartic acid, glutamic acid, homocysteic acid and cysteic acid;

[0850] X₄₂ is selected from the group consisting of alanine ornithine and arginine; and R₁₃ is COOH or CONH₂;

[0851] R₂₂ is selected from the group consisting of AYRPSE (SEQ ID NO: 14), FVNQ (SEQ ID NO: 12), PGPE (SEQ ID NO: 11), a tripeptide glycine-proline-glutamic acid, a tripeptide valine-asparagine-glutamine, a dipeptide proline-glutamic acid, a dipeptide asparagine-glutamine, glutamine, glutamic acid and an N-terminal amine; and

[0852] R₁₃ is COOH or CONH₂.

[0853] In embodiment 11 the conjugate of any one of embodiments 1-7 is provided wherein said B chain comprises a sequence R₂₂-X₂₅LCGX₂₉X₃₀LVX₃₃X₃₄LYLVCGX₄₁X₄₂GFX₄₅YT-Z₁-B₁ (SEQ ID NO: 142), wherein

[0854] Z₁ is a dipeptide selected from the group consisting of aspartate-lysine, lysine-proline, and proline-lysine; and

[0855] B₁ is selected from the group consisting of threonine, alanine or a threonine-arginine-arginine tripeptide.

[0856] In embodiment 12 the conjugate of any one of embodiments 1-7 is provided wherein said A chain comprises a sequence GIVEQCCTSICSLYQLENYCN-R₁₃ (SEQ ID NO: 1) and said B chain comprises a sequence FVNQHLCGSHLVEALYLVCGERGFFYTPKT (SEQ ID NO: 2).

[0857] In embodiment 13 the conjugate of any one of embodiments 1-12 is provided wherein the insulin peptide is a single chain insulin and the peptide linker joining the B and A chains is selected from the group consisting of SSSSKAPPPSLPSPSRLPGPSDTPILPQR (SEQ ID NO: 52), SSSSRAPPPSLPSPSRLPGPSDTPILPQK (SEQ ID NO: 51), GAGSSSX₅₇X₅₈ (SEQ ID NO: 76), GYGSSSX₅₇X₅₈ (SEQ ID NO: 21) and GYGSSSX₅₇X₅₈APQT; (SEQ ID NO: 77), wherein

[0858] X₅₇ and X₅₈ are independently arginine, lysine or ornithine.

[0859] In embodiment 14 the conjugate of any one of embodiments 1-13 is provided wherein the peptide linker is selected from the group consisting of GYGSSSRR (SEQ ID NO: 18) and GAGSSSRR (SEQ ID NO: 22).

[0860] In embodiment 15 the conjugate of any one of embodiments 1-14 is provided wherein the glucagon related peptide comprises the sequence of SEQ ID NO: 72 or an analog of SEQ ID NO: 72, wherein said analog differs from SEQ ID NO: 72 by 1 to 3 amino acid modifications, selected from positions 1, 2, 3, 5, 7, 10, 11, 13, 14, 17, 18, 19, 21, 24, 27, 28, and 29, wherein the glucagon related peptide comprises an intramolecular bridge between the side chains of the amino acids at positions 12 and 16, 16 and 20, 20 and 24, or 24 and 28 or a pharmaceutically acceptable salt thereof.

[0861] In embodiment 16 the conjugate of any one of embodiments 1-15 is provided wherein the glucagon related peptide comprises a salt bridge or a lactam bridge between amino acids at positions 16 and 20.

[0862] In embodiment 17 the conjugate of any one of embodiments 1-16 is provided further comprising a peptide selected from the group consisting of SEQ ID NOs: 78, 79, and 80 linked to the carboxy terminus of said glucagon related peptide. In embodiment 18 the conjugate of any one of embodiments 1-17 is provided wherein the amino acid at position 3 of the glucagon related peptide is glutamic acid. In embodiment 19 the conjugate of any one of embodiments 1-18 is provided wherein the amino acid at position 28 of the glucagon related peptide is Asp, Asn, or Lys, and the amino acid at position 29 of the glucagon related peptide is Gly or Thr. In embodiment 20 the conjugate of any one of embodiments 1-19 is provided wherein the amino acid at position 16 of the glucagon related peptide is glutamic acid, the amino acid at position 20 of the glucagon related peptide is lysine, and the C-terminal carboxylic acid group of the glucagon related peptide is replaced with an amide, optionally with a lactam bridge between the glutamic acid at position 16 and the lysine at position 20 of the glucagon related peptide. In embodiment 21 the conjugate of any one of embodiments 1-20 is provided wherein the amino acid at position 1 or 2 of the glucagon related peptide is modified to exhibit reduced susceptibility to cleavage by dipeptidyl peptidase IV (DPP-IV). In embodiment 22 the conjugate of any one of embodiments 1-21 is provided wherein the glucagon related peptide comprises an amino acid sequence selected from the group consisting of:
[0863] a. SEQ ID NO: 81;
[0864] b. SEQ ID NO: 83;
[0865] c. SEQ ID NO: 89;
[0866] d. any one of SEQ ID NOs: 84-88;
[0867] e. any one of SEQ ID Nos: 100-103;
[0868] f. SEQ ID NO: 108, wherein the amino acid at position 20 is selected from the group consisting of arginine, ornithine, and citrulline;
[0869] g. any one of SEQ ID Nos: 98, 99, 109-112, 104-106, and SEQ ID NO: 72, wherein the Xaa at position 28 of the peptide is asparagine or aspartic acid; the Xaa at position 29 of the peptide is threonine or glycine; and C-terminus of the peptide further comprises SEQ ID NO: 78, SEQ ID NO: 79, COOH or CONH₂; and
[0870] h. any one of SEQ ID Nos: 251, 319 and 510.

[0871] In embodiment 23 the conjugate of any one of embodiments 1-14 is provided wherein the glucagon related peptide comprises an analog of glucagon (SEQ ID NO: 701) having GIP agonist activity, said analog comprising one or more of the following modifications:
[0872] (a) an amino acid modification at position 1 that confers GIP agonist activity, optionally, wherein the amino acid at position 1 is an amino acid lacking an imidazole side chain;
[0873] (b) an amino acid substitution of Ser at position 16 with an amino acid of Formula IV:

[chemical structure]

[0874] wherein n is 1 to 7, wherein each of R1 and R2 is independently selected from the group consisting of H, C₁-C₁₈ alkyl, (C₁-C₁₈ alkyl)OH, (C₁-C₁₈ alkyl)NH₂, (C₁-C₁₈ alkyl)SH, (C₀-C₄ alkyl)(C₃-C₆)cycloalkyl, (C₀-C₄ alkyl)(C₂-C₅ heterocyclic), (C₀-C₄ alkyl)(C₆-C₁₀ aryl)R₇, and (C₁-C₄ alkyl)(C₃-C₉ heteroaryl), wherein R₇ is H or OH, and the side chain of the amino acid of Formula IV comprises a free amino group, the amino acid of Formula IV optionally being homoLys, Lys, Orn, or 2,4-diaminobutyric acid (Dab),
[0875] (c) one, two, three, or all of the amino acids at positions 16, 20, 21, and 24 of the analog is substituted with an α,α-disubstituted amino acid,
[0876] (d) amino acid modifications at one, two or all of positions 27, 28 and 29, and
[0877] (e) 1-9 further amino acid modifications relative to the glucagon sequence (SEQ ID NO: 701),
   wherein the EC50 of the analog for GIP receptor activation is about 10 nM or less.

[0878] In embodiment 24 the conjugate of any one of embodiments 1-14 is provided wherein the glucagon related peptide comprises the following modifications: (a) the amino acid at position 1 is a large, aromatic amino acid, optionally, Tyr, and (b) wherein (i) the Met at position 27 is substituted with a large, aliphatic amino acid, optionally Leu, (ii) the Asn at position 28 is substituted with a small aliphatic amino acid, optionally Ala, or (iii) the Thr at position 29 is substituted with a small aliphatic amino acid, optionally Gly, or wherein the analog comprises a combination of (i), (ii), and (iii).

[0879] In embodiment 25 the conjugate of any one of embodiments 23 or 24 is provided wherein the glucagon related peptide further comprises the amino acid sequence of GPSSGAPPPS (SEQ ID NO: 95) or XGPSSGAPPPS (SEQ ID NO: 96) linked to said peptide at a position located C-terminal to the amino acid at position 29. In embodiment 26 the conjugate of any one of embodiments 1-14 and 23-25 is provided, wherein the glucagon related peptide further comprises one or more of the following modifications:
[0880] (a) Ser at position 2 substituted with D-Ser, Ala, D-Ala, Gly, N-methyl-Ser, AIB, Val, or α-amino-N-butyric acid;
[0881] (b) Gln at position 3 substituted with Glu;
[0882] (c) substitution of the amino acid Tyr at position 10 with an amino acid, optionally an amino acid of Formula I:

[chemical structure]

[0883] wherein n=1 to 4,
[0884] comprising a side chain covalently linked to an acyl group or alkyl group;
[0885] (d) addition of an amino acid, optionally an amino acid of Formula I, comprising a side chain covalently linked to an acyl group or alkyl group as the C-terminal amino acid of the analog;
[0886] (e) Lys at position 12 substituted with Ile;
[0887] (f) Arg at position 17 substituted with Gln;
[0888] (g) Arg at position 18 substituted with Ala;
[0889] (h) Asp at position 21 substituted with Glu;
[0890] (i) Gln at position 24 substituted with Asn; and
[0891] (j) replacement of the carboxylic acid of the C-terminal amino acid with a charge-neutral group, optionally, an amide.

[0892] In embodiment 27 the conjugate of any one of embodiments 1-14 and 23-25 is provided wherein the glucagon related peptide comprises an amino acid sequence according to any one of SEQ ID NOS: 227, 228, 229 or 230 further comprising a terminal extension of an amino acid sequence of GPSSGAPPPS (SEQ ID NO: 820) or XGPSSGAPPPS (SEQ ID NO: 1096), wherein X is any amino acid, C-terminal to the amino acid at position 29. In embodiment 28 the conjugate of any one of embodiments 1-14 or 23 is provided wherein the glucagon related peptide comprises an amino acid sequence selected from the group consisting of SEQ ID NOs: 920-964, 146-164, 166, 192-207, 209-221 and 223. In embodiment 29 the conjugate of any one of embodiments 1-14 is provided wherein the glucagon related peptide comprises the sequence of SEQ ID NO: 701 or the a modified SEQ ID NO: 701 comprising one, two, three or more charged amino acid(s) at a position C-terminal to the amino acid at position 27 of the glucagon related peptide and up to 7 additional amino acid modifications of relative to SEQ ID NO: 701. In embodiment 30 the conjugate of any one of embodiments 1-14 or 29 is provided wherein one, two, three or more charged amino acid(s) at a position C-terminal to the amino acid at position 27 are provided wherein the charged amino acids are Glu or Asp. In embodiment 31 the conjugate of any one of embodiments 1-30 is provided wherein the glucagon related peptide comprises the sequence of HAEGTFTSDVSSYLEEQAAREFIAWLVRGRG (SEQ ID NO: 700), HAEGTFTSDVSSYLEGQAAKEFIAWLVKGRG (SEQ ID NO: 703), HAEGTFTSDVSSYLEGQAAKEFICWLVKGR (SEQ ID NO: 717) HSQGTFTSDYSKYLDSRRAQDFVQWLMNT (SEQID NO: 701) or HSQGTFTSDYSKYLDERRAQDFVQWLMNT (SEQ ID NO: 699). In embodiment 29 the conjugate of any one of embodiments 1-31 is provided wherein the insulin peptide is a single chain insulin analog comprising the sequence GPEX₂₅LCGAX₃₀LVDALYLVCGDX₄₂GFYFNX₄₈X₄₉GAGSSSRRGIVDECCX₈RSCDLR RLENYCN-R₁₃ (SEQ ID NO: 144), FVNQHLCGSHLVEALYLVCGERGFFYTPKTGAGSSSRRGIVEQCCTSICSLYQLENY CN-R₁₃ (SEQ ID NO: 143) or GPEHLCGAHLVDALYLVCGDRGFYFNDRGAGSSSRRGIVDECCHRSCDLRRLENYC N (SEQ ID NO: 145) wherein

[0893] X₈ is phenylalanine or histidine;

[0894] X₂₅ is histidine or threonine;

[0895] X₃₀ is histidine, aspartic acid, glutamic acid, homocysteic acid or cysteic acid;

[0896] X₄₂ is alanine ornithine or arginine;

[0897] X₄₈ is lysine or aspartic acid;

[0898] X₄₉ is proline, ornithine or arginine; and

[0899] R₁₃ is COOH or CONH₂.

[0900] In embodiment 33 the conjugate of any one of embodiments 1-32 is provided, wherein the conjugate is further modified to comprise the structure U-J, wherein

[0901] U is an amino acid or a hydroxy acid;

[0902] J is an N-alkylated amino acid linked to said conjugate through an amide bond between a carboxyl moiety of J and an amine of the conjugate, wherein U, J, or the amino acid of the conjugate to which U-J is linked is a non-coded amino acid, further wherein the chemical cleavage half-life (t_{1/2}) of U-J from the conjugate is at least about 1 hour to about 1 week in PBS under physiological conditions.

[0903] In embodiment 34 the conjugate of any one of embodiments 33 is provided wherein the conjugate further comprises a hydrophilic moiety covalently linked to structure U-J or alternatively a hydrophilic moiety is covalently linked to the side chain of an amino acid of said conjugate, including a hydrophilic moiety covalently linked at one or more positions corresponding to A14, A15, B0, B1, B10, B22, B28, B29 or positions 16, 17, 20, 21, 24, or 29 of native glucagon (SEQ ID NO: 701), or at the C-terminal region of the glucagon related peptide. Optionally in any of these embodiments, the hydrophilic moiety is a polyethylene glycol.

[0904] In embodiment 35 the conjugate of any one of embodiments 1-32 is provided, wherein the conjugate is further modified to comprise an acyl group or alkyl group covalently linked to an amino acid side chain. In a further embodiment, said acyl group or alkyl group is covalently linked to a position of the glucagon related peptide that corresponds to position 10 of native glucagon (SEQ ID NO: 701), or at one or more positions selected from A14, A15, B0, B1, B10, B22, B28, B29 of the insulin peptide, or at the side chain of an amino acid of the structure U-J. A pharmaceutical composition comprising a conjugate of any one of the preceding embodiments, or pharmaceutically acceptable salt thereof, and a pharmaceutically acceptable carrier is also provided in accordance with the present disclosure.

### Example 1

### Synthesis of Insulin a & B Chains

[0905] Insulin A & B chains were synthesized on 4-methylbenzhydryl amine (MBHA) resin or 4-Hydroxymethyl-phenylacetamidomethyl (PAM) resin using Boc chemistry. The peptides were cleaved from the resin using HF/p-cresol 95:5 for 1 hour at 0° C. Following HF removal and ether precipitation, peptides were dissolved into 50% aqueous acetic acid and lyophilized. Alternatively, peptides were synthesized using Fmoc chemistry. The peptides were cleaved from the resin using Trifluoroacetic acid (TFA)/Triisopropylsilane (TIS)/H₂O (95:2.5:2.5), for 2 hour at room temperature. The peptide was precipitated through the addition of an excessive amount of diethyl ether and the pellet solubilized in aqueous acidic buffer. The quality of peptides were monitored by RP-HPLC and confirmed by Mass Spectrometry (ESI or MALDI).

[0906] Insulin A chains were synthesized with a single free cysteine at amino acid 7 and all other cysteines protected as acetamidomethyl A-(SH)⁷(Acm)^{6,11,20}. Insulin B chains were synthesized with a single free cysteine at position 7 and the other cysteine protected as acetamidomethyl B-(SH)⁷(Acm)¹⁹. The crude peptides were purified by conventional RP-HPLC.

[0907] The synthesized A and B chains were linked to one another through their native disulfide bond linkage in accordance with the general procedure outlined in FIG. 1. The respective B chain was activated to the Cys⁷-Npys analog through dissolution in DMF or DMSO and reacted with 2,2′-Dithiobis(5-nitropyridine) (Npys) at a 1:1 molar ratio, at room temperature. The activation was monitored by RP-HPLC and the product was confirmed by ESI-MS.

[0908] The first B7-A7 disulfide bond was formed by dissolution of the respective A-(SH)⁷(Acm)^{6,11,20} and B-(Npys)⁷(Acm)¹⁹ at 1:1 molar ratio to a total peptide concentration of 10 mg/ml. When the chain combination reaction was complete the mixture was diluted to a concentration of 50% aqueous acetic acid. The last two disulfide bonds were formed simultaneously through the addition of iodine. A 40 fold molar excess of iodine was added to the solution and the mixture was stirred at room temperature for an additional hour. The reaction was terminated by the addition of an aqueous ascorbic acid solution. The mixture was purified by RP-HPLC and the final compound was confirmed by MALDI-MS. As shown in FIG. 2 and the data in Table 1, the synthetic insulin prepared in accordance with this procedure compares well with purified insulin for insulin receptor binding.

[0909] Insulin peptides comprising a modified amino acid (such as 4-amino phenylalanine at position A19) can also be synthesized in vivo using a system that allows for incorporation of non-coded amino acids into proteins, including for example, the system taught in U.S. Pat. Nos. 7,045,337 and 7,083,970.

TABLE 1
Activity of synthesized insulin relative to native insulin

| | Insulin Standard | | A7-B7 Insulin | |
|---|---|---|---|---|
| | AVER. | STDEV | AVER. | STDEV |
| IC₅₀ (nM) | 0.24 | 0.07 | 0.13 | 0.08 |
| % of Insulin Activity | 100 | | 176.9 | |

### Example 2

### Pegylation of Amine Groups (N-Terminus and Lysine) by Reductive Alkylation

[0910] a. Synthesis

[0911] Insulin (or an insulin analog), mPEG20k-Aldyhyde, and NaBH₃CN, in a molar ratio of 1:2:30, were dissolved in acetic acid buffer at a pH of 4.1-4.4. The reaction solution was composed of 0.1 N NaCl, 0.2 N acetic acid and 0.1 N Na₂CO₃. The insulin peptide concentration was approximately 0.5 mg/ml. The reaction occurs over six hours at room temperature. The degree of reaction was monitored by RP-HPLC and the yield of the reaction was approximately 50%.

[0912] b. Purification

[0913] The reaction mixture was diluted 2-5 fold with 0.1% TFA and applied to a preparative RP-HPLC column. HPLC condition: C4 column; flow rate 10 ml/min; A buffer 10% ACN and 0.1% TFA in water; B buffer 0.1% TFA in ACN; A linear gradient B % from 0-40% (0-80 min); PEG-insulin or analogues was eluted at approximately 35% buffer B. The desired compounds were verified by MALDI-TOF, following chemical modification through sulftolysis or trypsin degradation.

### Pegylation of Amine Groups (N-Terminus and Lysine) by N-Hydroxysuccinimide Acylation.

[0914] a. Synthesis

[0915] Insulin (or an insulin analog) along with mPEG20k-NHS were dissolved in 0.1 N Bicine buffer (pH 8.0) at a molar ratio of 1:1. The insulin peptide concentration was approximately 0.5 mg/ml. Reaction progress was monitored by HPLC. The yield of the reaction is approximately 90% after 2 hours at room temperature.

[0916] b. Purification

[0917] The reaction mixture was diluted 2-5 fold and loaded to RP-HPLC.

HPLC condition: C4 column; flow rate 10 ml/min; A buffer 10% ACN and 0.1% TFA in water; B buffer 0.1% TFA in ACN; A linear gradient B % from 0-40% (0-80 min); PEG-insulin or analogues was collected at approximately 35% B. The desired compounds were verified by MALDI-TOF, following chemical modification through sulftolysis or trypsin degradation.

### Reductive Aminated Pegylation of Acetyl Group on the Aromatic Ring of the Phenylalanine

[0918] a. Synthesis

[0919] Insulin (or an insulin analogue), mPEG20k-Hydrazide, and NaBH₃CN in a molar ratio of 1:2:20 were dissolved in acetic acid buffer (pH of 4.1 to 4.4). The reaction solution was composed of 0.1 N NaCl, 0.2 N acetic acid and 0.1 N Na₂CO₃. Insulin or insulin analogue concentration was approximately 0.5 mg/ml. at room temperature for 24 h. The reaction process was monitored by HPLC. The conversion of the reaction was approximately 50%. (calculated by HPLC)

[0920] b. Purification

[0921] The reaction mixture was diluted 2-5 fold and loaded to RP-HPLC.

HPLC condition: C4 column; flow rate 10 ml/min; A buffer 10% ACN and 0.1% TFA in water; B buffer 0.1% TFA in ACN; A linear gradient B % from 0-40% (0-80 min); PEG-insulin, or the PEG-insulin analogue was collected at approximately 35% B. The desired compounds were verified by MALDI-TOF, following chemical modification through sulftolysis or trypsin degradation.

### Example 3

### Insulin Receptor Binding Assay

[0922] The affinity of each peptide for the insulin or IGF-1 receptor was measured in a competition binding assay utilizing scintillation proximity technology. Serial 3-fold dilutions of the peptides were made in Tris-Cl buffer (0.05 M Tris-HCl, pH 7.5, 0.15 M NaCl, 0.1% w/v bovine serum albumin) and mixed in 96 well plates (Corning Inc., Acton, Mass.) with 0.05 nM (3-[125I]-iodotyrosyl) A TyrA14 insulin or (3-[125I]-iodotyrosyl) IGF-1 (Amersham Biosciences, Piscataway, N.J.). An aliquot of 1-6 micrograms of plasma membrane fragments prepared from cells over-expressing the human insulin or IGF-1 receptors were present in each well and 0.25 mg/well polyethylene imine-treated wheat germ agglutinin type A scintillation proximity assay beads (Amersham Biosciences, Piscataway, N.J.) were added. After five minutes of shaking at 800 rpm the plate was incubated for 12 h at room temperature and radioactivity was measured with MicroBeta1450 liquid scintillation counter (Perkin-Elmer, Wellesley, Mass.). Non-specifically bound (NSB) radioactivity was measured in the wells with a four-fold concentration excess of “cold” native ligand than the highest concentration in test samples. Total bound radioactivity was detected in the wells with no competitor. Percent specific binding was calculated as following: % Specific Binding=(Bound−NSB/Total bound−NSB)×100. IC50 values were determined by using Origin software (OriginLab, Northampton, Mass.).

### Example 4

### Insulin Receptor Phosphorylation Assay

[0923] To measure receptor phosphorylation of insulin or incretin-insulin conjugate, receptor transfected HEK293 cells were plated in 96 well tissue culture plates (Costar #3596, Cambridge, Mass.) and cultured in Dulbecco's modified Eagle medium (DMEM) supplemented with 100 IU/ml penicillin, 100 μg/ml streptomycin, 10 mM HEPES and 0.25% bovine growth serum (HyClone SH30541, Logan, Utah) for 16-20 hrs at 37° C., 5% CO₂ and 90% humidity. Serial dilutions of insulin or insulin analogs were prepared in DMEM supplemented with 0.5% bovine serum albumin (Roche Applied Science #100350, Indianapolis, Ind.) and added to the wells with adhered cells. After 15 min incubation at 37° C. in humidified atmosphere with 5% CO₂ the cells were fixed with 5% paraformaldehyde for 20 min at room temperature, washed twice with phosphate buffered saline pH 7.4 and blocked with 2% bovine serum albumin in PBS for 1 hr. The plate was then washed three times and filled with horseradish peroxidase-conjugated antibody against phosphotyrosine (Upstate biotechnology #16-105, Temecula, Calif.) reconstituted in PBS with 2% bovine serum albumin per manufacturer's recommendation. After 3 hrs incubation at room temperature the plate was washed 4 times and 0.1 ml of TMB single solution substrate (Invitrogen, #00-2023, Carlbad, Calif.) was added to each well. Color development was stopped 5 min later by adding 0.05 ml 1 N HCl. Absorbance at 450 nm was measured on Titertek Multiscan MCC340 (ThermoFisher, Pittsburgh, Pa.). Absorbance vs. peptide concentration dose response curves were plotted and EC₅₀ values were determined by using Origin software (OriginLab, Northampton, Mass.).

### Glucagon and GLP-1 Functional Assay-cAMP Synthesis

[0924] The ability of individual incretin or incretin-insulin analogs to induce cAMP was measured in a firefly luciferase-based reporter assay. HEK293 cells co-transfected with a receptor (glucagon receptor, GLP-1 receptor or GIP receptor) and luciferase gene linked to cAMP responsive element were serum deprived by culturing 16 h in DMEM (Invitrogen, Carlsbad, Calif.) supplemented with 0.25% Bovine Growth Serum (HyClone, Logan, Utah) and then incubated with serial dilutions of either glucagon, GLP-1, GIP or novel glucagon analogs for 5 h at 37° C., 5% CO₂ in 96 well poly-D-Lysine-coated “Biocoat” plates (BD Biosciences, San Jose, Calif.). At the end of the incubation 100 microliters of LucLite luminescence substrate reagent (Perkin-Elmer, Wellesley, Mass.) were added to each well. The plate was shaken briefly, incubated 10 min in the dark and light output was measured on MicroBeta-1450 liquid scintillation counter (Perkin-Elmer, Wellesley, Mass.). Effective 50% concentrations were calculated by using Origin software (OriginLab, Northampton, Mass.

### Example 5

### Insulin Like Growth Factor (IGF) Analog IGF1 (Y^{B16}L^{B17})

[0925] Applicants have discovered an IGF analog that demonstrates similar activity at the insulin receptor as native insulin. More particularly, the IGF analog (IGF1 (Y^{B16}L^{B17}) comprises the native IGF A chain (SEQ ID NO: 5) and the modified B chain (SEQ ID NO: 6), wherein the native glutamine and phenylalanine at positions 15 and 16 of the native IGF B-chain (SEQ ID NO: 3) have been replaced with tyrosine and leucine residues, respectively. As shown in FIG. 4 and Table 2 below the binding activities of IGF1 (Y^{B16}L^{B17}) and native insulin demonstrate that each are highly potent agonists of the insulin receptor.

TABLE 2

| | Insulin Standard | | IGF1 (Y^{B16}L^{B17}) | |
|---|---|---|---|---|
| | AVER. | STDEV | AVER. | STDEV |
| IC₅₀ (nM) | 1.32 | 0.19 | 0.51 | 0.18 |
| % of Insulin Activity | 100 | | 262 | |

### Example 6

### Additional IGF Insulin Analogs

[0926] Further modifications of the IGF1 (Y^{B16}L^{B17}) peptide sequence reveal additional IGF insulin analogs that vary in their potency at the insulin and IGF-1 receptor. Binding data is presented in Table 3 for each of these analogs (using the assay of Example 3), wherein the position of the modification is designated based on the corresponding position in the native insulin peptide (DPI=des B26-30). For example, a reference herein to “position B28” absent any further elaboration would mean the corresponding position B27 of the B chain of an insulin analog in which the first amino acid of SEQ ID NO: 2 has been deleted. Thus a generic reference to “B(Y16)” refers to a substitution of a tyrosine residue at position 15 of the B chain of the native IGF-1 sequence (SEQ ID NO: 3). Data regarding the relative receptor binding of insulin and IGF analogs is provided in Table 3, and data regarding IGF analog stimulated phosphorylation (using the assay of Example 4) is provided in Table 4.

TABLE 3
Receptor Binding Affinity of Insulin and IGF Analogues

| | Insulin Receptor | | | | | IGF-1 Receptor | | | | | |
|---|---|---|---|---|---|---|---|---|---|---|---|
| | | | | | % native | | | | | % native | |
| | | | | | % insulin | | | | % | IGF-1 | |
| | nM | | | insulin | activity | | | | IGF-1 | activity | |
| Analogue | IC₅₀: | STDev | Date | (in test) | (0.6 nM) | IC₅₀: | STDev | Date | (in test) | (0.55 nM) | Ratio |
| IGF-1 A:B | 10.41 | 1.65 | Sep. 4, 2007 | 5.8 | 5.8 | | | | | | |
| IGF-1 A:B (E10Y16L17) | 0.66 | 0.36 | May 22, 2007 | 58.7 | 90.9 | 7.85 | 1.98 | Jun. 4, 2007 | 6.8 | 7.0 | 11.9 |
| | 0.51 | 0.18 | May 29, 2007 | 98.8 | 117.6 | 12.19 | 2.17 | Sep. 18, 2007 | 5.0 | 4.5 | |
| IGF-1 A:B (E10 Y16L17)- | 1.22 | 0.30 | Mar. 20, 2008 | 36.5 | 50.0 | 17.50 | 2.25 | Apr. 4, 2007 | 3.0 | 3.1 | 14.3 |
| E31E3 2B-COOH | | | | | | | | | | | |
| IGF-1 A:B (D10Y16L17) | 0.26 | 0.02 | Nov. 9, 2007 | 301.0 | 231.0 | 6.79 | 1.50 | Apr. 4, 2008 | 7.7 | 8.1 | |
| DPI A-COOH | | | | | | | | | | | |
| | 0.2 | 0.02 | Dec. 4, 2007 | 380.1 | 300.0 | | | | | | |
| | 0.42 | 0.06 | Jun. 5, 2008 | 174.1 | 144.1 | | | | | | |
| IGF-1 A:B (E10Y16L17) | 0.38 | 0.08 | Aug. 10, 2007 | 51.1 | 157.9 | 22.89 | 5.26 | Sep. 18, 2007 | 3.3 | 2.4 | 60.2 |
| DPI | | | | | | | | | | | |
| IGF-1 A:B | 0.16 | 0.07 | Nov. 9, 2007 | 479.0 | | 4.66 | 0.77 | Apr. 4, 2008 | 11.2 | 11.8 | 29.1 |
| (H5D10Y16L17) DPI | | | | | | | | | | | |
| IGF-1 A:B | 0.25 | 0.04 | Nov. 9, 2007 | 316.0 | | | | | | | |
| (H5D10Y16L17) | | | | | | | | | | | |
| (S═O) DPI | | | | | | | | | | | |
| IGF-1 A (H8 A9 N21): | 0.05 | 0.01 | Dec. 4, 2007 | 1576.7 | | 4.03 | 0.50 | Apr. 4, 2008 | 12.9 | 13.6 | 80.6 |
| B (H5D10Y16L17) | | | | | | | | | | | |
| DPI A-COOH | | | | | | | | | | | |
| | 0.09 | 0.02 | Dec. 14, 2007 | 1667.0 | | | | | | | |
| IGF-1 A (H8 A9 N21): | 0.12 | 0.02 | Dec. 14, 2007 | 1171.4 | | 22.83 | 3.53 | Apr. 4, 2008 | 2.3 | 2.4 | 190.3 |
| B (H5D10Y16L17 A22) | | | | | | | | | | | |
| DPI A-COOH | | | | | | | | | | | |
| IGF-1 A (H8 A9 N21): | 0.36 | 0.10 | Dec. 14, 2007 | 400.7 | | | | | | | |
| B (H5D10Y16L17A22) | | | | | | | | | | | |
| (S═O) DPI | | | | | | | | | | | |
| A-COOH | | | | | | | | | | | |
| IGF-1 A:IGF-1 B (1-8)- | 1.59 | 0.62 | May 22, 2007 | 19.1 | 37.7 | 131.30 | 58.05 | Jun. 4, 2007 | 0.3 | 0.4 | 82.6 |
| ln (9-17)-IGF-1 B (18-30) | | | | | | | | | | | |
| IGF-1 A:ln (1-17)-IGF-1 | 2.77 | 1.19 | May 22, 2007 | 14.0 | 21.7 | 62.50 | 30.28 | Jun. 4, 2007 | 0.9 | 0.9 | 22.6 |
| B (18-30) | 2.67 | 0.67 | May 18, 2007 | 11.3 | 22.5 | | | | | | |
| | 2.48 | 1.35 | May 29, 2007 | 20.1 | 24.2 | | | | | | |
| IGF-1 A:ln B (1-5)-IGF-1 | 0.31 | 0.19 | Aug. 10, 2007 | 62.4 | 193.5 | 27.54 | 6.57 | Sep. 25, 2007 | 3.6 | 2 | 88.8 |
| B (YL) (6-30) | | | | | | | | | | | |
| IGF-2 native | | | | | | 13.33 | 1.85 | Sep. 25, 2007 | 7.5 | 4.5 | |
| IGF-2 AB | | | | | | | | | | | |
| IGF-2 AB (YL) | 6.81 | 3.81 | Oct. 10, 2007 | 8.4 | 8.8 | | | | | | |
| ln A:IGF-1 B (YL) | 82.62 | 31.75 | Sep. 4, 2007 | 0.9 | 0.7 | | | | | | |
| | 107.24 | 65.38 | Sep. 4, 2007 | 0.7 | 0.6 | | | | | | |
| ln A-IGF-2 D:ln B-IGF-2 C | 0.53 | 0.11 | Sep. 4, 2007 | 141.0 | 113.0 | 1.59 | 0.34 | Sep. 18, 2007 | 47.6 | 34.6 | |
| | 0.37 | 0.05 | Oct. 13, 2007 | 179.1 | 162.2 | 14.69 | 3.02 | Sep. 25, 2007 | 6.8 | 3.7 | 39.7 |

**All C terminals are amides (DPI) unless specified otherwise

TABLE 4
Total Phosphorylation by IGF-1 & IGF-2 Analogues

| | Insulin Receptor | | | | IGF-1 Receptor | | | | Selective |
|---|---|---|---|---|---|---|---|---|---|
| Analogue | EC50: | STDev | Date | % Insulin | EC50: | STDev | Date | % IGF | Ratio |
| Insulin | 1.26 | 0.098 | Dec. 14, 2007 | | 114.88 | 46.66 | Jan. 23, 2008 | | 90.89 |
| | 1.43 | 0.72 | Apr. 1, 2008 | | 86.02 | 29.35 | May 20, 2008 | | |
| | 1.12 | 0.11 | Mar. 31, 2008 | | | | | | |
| | 1.53 | 0.13 | Apr. 11, 2008 | | | | | | |
| | 2.70 | 0.71 | Apr. 16, 2008 | | | | | | |
| | 1.22 | 0.40 | May. 20, 2008 | | | | | | |
| IGF-1 | 54.39 | 21.102 | Dec. 14, 2007 | 2.3 | 0.87 | 0.16 | Jan. 23, 2008 | 100 | 0.02 |
| | | | | | 0.49 | 0.13 | May 20, 2008 | | |
| | | | | | 0.97 | 0.48 | Jul. 23, 2008 | | |
| IGF-1 AB | | | | | | | | | |
| IGF-1 A:B (E10Y16L17) | 2.57 | 0.59 | Mar. 31, 2008 | 49.2 | 7.42 | 5.59 | Mar. 23, 2008 | 13 | |
| IGF-1 A:B (E10 Y16L17)-E31E32 | 7.00 | 2.82 | Mar. 31, 2008 | 18.1 | | | | | |
| B-COOH | | | | | | | | | |
| | 8.52 | 4.34 | Apr. 16, 2008 | 31.7 | | | | | |
| IGF-1 AB (D10Y16L17) DPI | 0.08 | 0.006 | Dec. 14, 2007 | 1575 | 0.78 | 0.17 | Jan. 23, 2008 | 111.538 | 9.75 |
| A-COOH | 4.38 | 2.98 | Apr. 16, 2008 | ?? | | | | | |
| IGF-1 AB (E10Y16L17) DPI | | | | | | | | | |
| IGF-1 AB (H5D10Y16L17) DPI | | | | | 12.22 | 5.46 | Jan. 23, 2008 | 7.1 | |
| IGF-1 AB (H5D10Y16L17) (S═O) DPI | | | | | | | | | |
| IGF-1 A (H8 A9 N21) | 0.15 | 0.054 | Dec. 14, 2007 | 840 | 0.43 | 0.44 | Jan. 23, 2008 | 181.395 | 2.81 |
| B (H5D10Y16L17) DPI A-COOH | | | | | | | | | |
| | 0.25 | 0.2 | Apr. 16, 2008 | 1080 | | | | | |
| IGF-1 A (H8 A9 N21) | 0.35 | 0.064 | Dec. 14, 2007 | 360 | 11.26 | 2.55 | Jan. 23, 2008 | 7.7 | 32.54 |
| B (H5D10Y16L17A22) DPI A-COOH | | | | | | | | | |
| | 0.44 | 0.17 | Apr. 16, 2008 | 614 | | | | | |
| IGF-1 A (H8 A9 N21) | 0.72 | 0.098 | Dec. 14, 2007 | | | | | | |
| B (H5D10Y16L17A22) (S═O) DPI A- | | | | | | | | | |
| COOH | | | | | | | | | |

*All C-terminals are amides unless specified otherwise.

### Example 7

### Biosynthesis and Purification of Single Chain Insulin Analogs

[0927] An insulin-IGF-I minigene comprising a native insulin B and A chain linked via the IGF-I C chain)(B⁰-C¹-A⁰) was cloned into expression vector pGAPZα A (purchased from Invitrogen) under GAP promoter (promoter of the glyceraldehyde-3-phosphate dehydrogenase (GAPDH)) for constitutive expression and purification of recombinant protein in yeast Pichia pastoris. The minigene was fused to an N-terminal peptide encoding Saccharomyces cerevisiae α-mating factor leader signal for secretion of the recombinant protein into the medium. A Kex2 cleavage site between the minigene and the leading α-mating factor sequence was used to cleave the leader sequence for secretion of the minigene with native amino termini. Single-site alanine mutations were introduced into C peptide at positions 1 (G1A), 2 (Y2A), 3 (G3A), 4 (S4A), 5 (S5A), 6 (S6A), 7 (R7A), 8 (R8A), 10 (P10A), 11 (Q11A), and 12 (T12A) of the B⁰C¹A⁰ minigene.

[0928] The minigenes including B⁰C¹A⁰, eleven alanine mutants, and other select derivatives were transformed into yeast Pichia pastoris by electroporation. Positive transformants were selected on minimal methanol plates and a genomic preparation of each Pichia isolate was performed and integration of the constructs into the yeast genome was confirmed by PCR. An 833 base pair PCR product was visualized on an agarose DNA gel. The insulin analogs were produced by fermentation of a corresponding yeast line. The yeast cells were pelleted by centrifugation at 5 K for 20 minutes in 500 ml Beckman centrifuge tubes and the media was kept for subsequent protein purification.

[0929] Growth media supernatants were filtered through 0.2 μm Millipore filter. Acetonitrile (ACN) was added to the supernatant to a final volume of 20%. The supernatant was purified over a Amberlite XAD7HP resin from Sigma, pre-equilibrated with 20% aqueous ACN. The resin was then rinsed twice with 30 ml of 20% aqueous ACN and contaminants were removed with 30% aqueous ACN containing 0.1% TFA. Partially purified insulin analogs were eluted from the column with 54% aqueous ACN containing 0.1% TFA and lyophilizied. Lyophilized samples were re-suspended in 0.025M NH₃HCO₃ pH 8 and purified on a Luna C18 column (10 μm particle size, 300A° pore size). Protein was eluted from the column using a linear gradient of 20-60% aqueous ACN. MALDI-MS positive fractions were pooled and transferred to a disposable scintillation vial for subsequent lyophilization. Lyophilized samples were then resuspended in 20% aqueous ACN containing 0.1% TFA, and purified on a Luna C18 column (10 μm particle size, 300A° pore size). The protein was eluted from the column using a linear gradient of 18-54% aqueous ACN with 0.1% TFA. Protein elution was monitored at an absorbance 280 nm. MALDI-TOF MS positive fractions were analyzed via a C8 analytical column to insure purity.

[0930] The B⁰-C¹-A⁰ analog demonstrated potency that was equally effective at both insulin receptor isoforms and the IGF-1 receptor. Mutation of the tyrosine at position 2 to alanine or the shortening of the C-peptide to eight amino acids through deletion of C9-12 provided a selective enhancement in the specificity of insulin action by significant reduction in the IGF-1 receptor activity. See also the data provided in Tables 5A and 5B:

TABLE 5A
Insulin Binding & Phosphorylation Analysis
(B⁰C¹A⁰)

| | |
|---|---|
| Insulin Binding | Insulin Phosphorylation |

| Peptide | IC₅₀, nM | n | EC₅₀, nM | n |
|---|---|---|---|---|
| Insulin | 0.54 ± 0.02 | 4 | 1.67 ± 0.13 | 1 |
| IGF-1 | 18.81 ± 1.77 | 3 | 29.20 ± 8.41 | 1 |
| 010 | 2.83 ± 0.52 | 2 | 1.93 ± 0.43 | 1 |
| (B⁰C¹A⁰) | | | | |
| G1A | 1.21 ± 0.15 | 1 | 2.4 ± 0.24 | 1 |
| Y2A | 1.95 ± 0.28 | 3 | 1.86 ± 0.42 | 1 |
| G3A | 1.41 ± 0.05 | 2 | 2.13 ± 0.02 | 1 |
| S4A | 0.84 ± 0.47 | 2 | 0.76 ± 0.35 | 1 |
| S5A | 0.93 ± 0.44 | 1 | 2.23 ± 1.27 | 1 |
| S6A | 1.15 ± 0.24 | 1 | 2.33 ± 1.65 | 2 |
| R7A | 6.04 ± 0.82 | 1 | 5.21 ± 4.14 | 1 |
| R8A | 0.63 ± 0.09 | 1 | 2.03 ± 0.06 | 2 |
| P10A | 2.86 ± 0.93 | 1 | 2.59 ± 1.2 | 1 |
| Q11A | 1.79 ± 0.47 | 1 | 2.58 ± 0.83 | 1 |
| T12A | 1.2 ± 0.18 | 1 | 2.83 ± 1.31 | 1 |

TABLE 5B
IGF-1 Binding & Phosphorylation Analysis
(B⁰C¹A⁰)

| | |
|---|---|
| IGF-1 Binding | IGF-1 Phosphorylation |

| Peptide | IC₅₀, nM | n | EC₅₀, nM | n |
|---|---|---|---|---|
| Insulin | 60.63 ± 4.43 | 1 | 48.66 ± 1.59 | 1 |
| IGF-1 | 0.38 ± 0.07 | 1 | 0.88 ± 0.41 | 1 |
| 010 | 4.49 ± 1.04 | 1 | 1.29 ± 2.28 | 1 |
| (B⁰C¹A⁰) | | | | |
| G1A | 42.36 ± 16.24 | 1 | 1.4 ± 0.62 | 1 |
| Y2A | 257.9 ± 29.59 | 1 | 35.6 ± 14.55 | 1 |
| G3A | 34.02 ± 16.09 | 1 | 7.85 ± 0.78 | 1 |
| S4A | 15.30 ± 3.10 | 1 | 1.64 ± 1.65 | 1 |
| S5A | 13.06 ± 3.01 | 1 | 2.63 ± 1.88 | 1 |
| S6A | 2.44 ± 0.79 | 1 | 1.54 ± 0.62 | 2 |
| R7 | 43.86 ± 8.72 | 1 | 1.26 ± 1.55 | 1 |
| R8 | 10.85 ± 1.47 | 1 | 0.50 ± 0.23 | 2 |
| P10A | 6.42 ± 0.47 | 1 | 2.79 ± 1.12 | 1 |
| Q11A | 4.23 ± 0.43 | 1 | 0.41 ± 0.69 | 1 |
| T12A | 9.15 ± 0.83 | 1 | 1.44 ± 1.36 | 1 |

[0931] Position 2 and 3 in the C-peptide are most sensitive to modification at the IGF-1 receptor with the insulin receptor proving to be relatively immune to modification. All of the analogs maintained single unit nanomolar activity with certain specific analogs proving to be slightly enhanced in potency (low single unit nanomolar). The most insulin selective analogs were those that we missing the last four residues of the C-peptide, had an alanine mutation at position two of the C-peptide, or a combination of the two changes.

### Example 8

### Construction of Expression Vectors for Incretin-Insulin Hybrids

[0932] The genes of each of the incretin-insulin hybrids were synthesize by PCR, and then ligated into the expression vector modified from pET30a which includes a Small Ubiquitin-like modifier (SUMO) as a fusion leader sequence. There is a Tobacco Etch Virus (TEV) protease cleavage site positioned between SUMO and incretin-insulin hybrid. An In-Fusion HD Cloning System (Clontech) was used for ligation.

[0933] The expression and purification of incretin-insulin hybrids was conducted as follows. The expression vectors were transformed into Origami B (DE3) (Novagen) competent cells. The cells were cultured in Luria Broth (LB) with 50 ug/ml Ampicillin, 25 ug/ml kanamycin and 5 ug/ml tetracycline at 37° C. until DO600 nm reached 0.8-1.0. At that point the temperature was changed to 18° C. and IPTG was added (0.2 mM) to the culture to induce gene expression. The induction was continued overnight, and then cells were harvested by centrifugation at 5,000 rpm for 15 minutes.

[0934] The fermentation cell pellet were suspended in 25 mM Tris, pH8.0, that included 300 mM NaCl, 10 mM Imidazole, 6M Guanidine Hydrochloride and the cells were lysed by sonication. The lysate was centrifuged at 15,000 rpm for 30 minutes and the supernatant was loaded to a Ni-NTA affinity column. The column was washed with 25 mM Tris, pH8.0, that included 300 mM NaCl, 20 mM Imidazole. The protein was eluted with the same buffer of 25 mM Tris, pH8.0, with 300 mM NaCl that also included 500 mM imidazole. The purified protein was digested with TEV protease overnight at 4° C. and diluted fourfold v/v with MiliQ water. This protein solution was applied to a Q-Sepharose column pre equilibrated with 20 mM Tris, pH8.0 with 10% glycerol. The Q-Sepharose column was eluted with a gradient of 100-600 mM NaCl, over fifteen column volumes. The purity of the chromatographically purified proteins was confirmed by analytical HPLC and MALDI-TOF mass spectrum.

### Example 9

### In Vitro Activity of Incretin-Insulin Fusions

[0935] A series of incretin-insulin fusion polypeptides were constructed to measure the activity of the compounds at the insulin and respective incretin receptors using the in vitro assays disclosed in Example 4. FIG. 6 presents the sequence of a set of GLP1 and GIP fusion peptides formed with a single chain insulin analog. Additional incretin-insulin derivatives were formed wherein the sequence of the insulin component or the incretin component of the conjugate is modified to eliminate the activity of one of the two components of the conjugate.

[0936] More particularly, the GLP-1 Parent Peptide (GLP1-DP8; SEQ ID NO: 132) was formed between a GLP-1 peptide that has agonist activity at the GLP-1 receptor and an insulin peptide (DP8) that has agonist activity at the insulin receptor. Derivatives of GLP1-DP8 were prepared wherein the insulin sequence is modified by substituting the tyrosine at position A19 with alanine to effectively eliminate insulin activity (GLP1-DP8A19; SEQ ID NO: 133), or the GLP sequence was modified by substituting the phenylalanine at position 22 with alanine to effectively eliminate GLP-1 activity (GLP1-A22; SEQ ID NO: 134). Similarly, a glucagon Parent Peptide (Glu-DP8; SEQ ID NO: 135) was formed between a glucagon peptide that has agonist activity at the glucagon receptor and an insulin peptide that has agonist activity at the insulin receptor. Derivatives of Glu-DP8 were prepared wherein the insulin sequence is modified by substituting the tyrosine at position A19 with alanine to effectively eliminate insulin activity (Glu-DP8A19; SEQ ID NO: 136), or the glucagon sequence was modified by substituting the glutamine at position 3 with glutamic acid to eliminate glucagon activity. Additional, a further derivative of Glu-DP8 was designed to have activity at the insulin, glucagon and GLP-1 receptors wherein the Glu-DP8 sequences was modified by the substitution of the serine at position 16 with glutamic acid (Glucagon E16 (SEQ ID NO: 138).

[0937] Each of the conjugates was synthesized as disclosed in Example 8 and chromatographically purified. FIGS. 7 and 8 presents the EC₅₀ values of chromatographically isolated pool fractions of the synthesized GLP1-DP8 and Glu-DP8 conjugates, respectively, at the insulin, GLP1 and glucagon receptors, relative to native insulin, IGF-1 and native glucagon. For the isolated GLP1-DP8 conjugate fractions, pool 1 demonstrates almost identical activity as native insulin at the insulin receptor (see FIG. 7). All three pools demonstrated high activity at the GLP1 receptor. Accordingly, the conjugate of pool 1 demonstrates potency as high as native insulin and native GLP1 at their two respective receptors. For the isolated Glu-DP8 conjugate fractions, pool 1 demonstrates similar activity as native insulin at the insulin receptor, with the presence of the glucagon sequence moderating the activity of the conjugate at the insulin receptor. Pools 1 and 3 demonstrated high activity at the glucagon receptor. All three pool demonstrate poor activity at the GLP-1 receptor. Accordingly, the conjugate of pool 1 demonstrates high potency at the insulin and glucagon, but retaining selectivity with regard to the GLP1 receptor. Accordingly, the purified conjugates demonstrate the expected activities at their respective receptors indicating that the conjugates retain the activity of both of the two original active peptides that were joined.

[0938] The ability of the Glu-DP8 and GLP1-DP8 conjugates to lower blood glucose levels was investigated by administering the compounds to C57BL/6 Mice and measuring blood glucose. Mice were subcutaneously injected with either native insulin (FIG. 9A) at two doses (12 nmol/kg or 60 nmol/kg), or one of the conjugates, GLP1-DP8 (FIG. 9B) or Glu-DP8 (FIG. 9C) administered at three different concentrations (12 nmol/kg, 60 nmol/kg and 300 nmol/kg). The conjugates demonstrated a less steep drop in blood glucose and a longer half life than native insulin (greater duration of action). In addition GLP1-DP8 (FIG. 9B) is more active in glucose lowering than Glu-DP8 (FIG. 9C). This is believed to result from glucagon buffering against insulin activity. Accordingly, the conjugates show the ability to lower blood glucose in vivo and have a profile different from that of native insulin.

[0939] The activity of the Glu-DP8 and GLP1-DP8 conjugates can be modified using known mutation to knock out one of the two (incretin or insulin) activities of the conjugates. Each of the modified Glu-DP8 and GLP1-DP8 conjugates (GLP1-DP8A19, GLP1-A22, Glu-DP8A19, Glucagon E3 and Glucagon E16) was tested at the insulin, glucagon and GLP-1 receptors and the activities of the conjugates matched the expected activities for each compound. FIG. 10 provides the in vitro activity of GLP1-DP8 and GLP1-DP8A19. Substitution of alanine at the A19 position effectively eliminates insulin's activity at the insulin receptor. EC₅₀ values indicate that both insulin and GLP1-DP8 are potent insulin receptor agonists, whereas GLP-1 and GLP1-DP8A19 have poor activity at the insulin receptor.

[0940] FIG. 11 presents the in vitro insulin receptor activity (EC₅₀ values) of Glu-DP8 and derivative conjugates. In summary, each of the compounds demonstrates activity at the glucagon and insulin receptors and that activity can be disrupted by modifying the insulin or glucagon sequence. Each of the conjugates shows activity consistent with its peptide sequence and the conjugates do not cross react. Specifically, EC₅₀ values indicate that both insulin and Glu-DP8 are potent insulin receptor agonists, whereas glucagon and Glu-DP8A19 have poor activity at the insulin receptor. GluE3-DP8 and GluE16-DP8 also showed high potency at the insulin receptor due to the presence of the DP8 insulin sequence.

[0941] FIG. 12 presents the in vitro glucagon receptor activity (EC₅₀ values) of Glu-DP8, GluE3-DP8 and GluE16-DP8, Glu-DP8A19, and GLP-1-DP8. The glutamic acid substitution at position 3 of glucagon is known to effectively eliminate glucagon activity, and substitution of alanine at the A19 position of insulin is known to effectively eliminate insulin activity at the insulin receptor. The glutamic acid substitution at position 16 of glucagon produces a co-agonist of glucagon and GLP-1. The EC₅₀ values indicate that glucagon, Glu-DP8 and GluE16-DP8 are potent glucagon receptor agonists, whereas GLP-1 and GLP1-DP8, and GluE3-DP8 have poor activity at the glucagon receptor. Accordingly, the conjugates exhibit the expected activities.

[0942] FIG. 13 presents the in vitro GLP-1 receptor activity (EC₅₀ values) of GLP-1, GLP-1-DP8, GLP-1A22-DP8, GLP-1-DP8A19, Glu-DP8, and GluE16-DP8. GLP-1A22-DP8 represents a conjugate of insulin and GLP-1 wherein position 22 has been substituted with alanine, a modification known to effectively eliminate GLP-1 activity. EC₅₀ values indicate that GLP-1, GLP1-DP8 and GLP1-DP8A19 are potent GLP-1 receptor agonists, whereas GLP-1A22-DP8, Glu-DP8, and GluE16-DP8 have less activity at the GLP-1 receptor. Accordingly, the conjugates exhibit the expected activities.

[0943] The GLP1-DP8 and Glu-DP8 conjugates and their derivatives were tested in vivo for their ability to lower blood glucose levels. The in vivo results were consistent with the in vitro receptor data. FIGS. 14A-14B present the in vivo effect of the listed conjugates on blood glucose levels in C57BL/6 mice administered DP8 (FIG. 14A) or GLP1-DP8A19 (FIG. 14B) relative to native insulin. DP8 successfully lowered blood glucose whereas GLP1-DP8A19 failed to significantly lower blood glucose levels. FIG. 15A-15C present the in vivo effect of the listed conjugates on blood glucose levels in C57BL/6 mice administered Glu-DP8A19 (FIG. 15A) or GLP1A22-DP8 (FIG. 15B) or GluE3/DP8 (FIG. 15C), relative to native insulin. The Glu-DP8A19 conjugate lacks insulin activity, yet still induces blood glucose lowering in vivo resulting from glucagon stimulated insulin secretion. GLP1A22-DP8 has reduced glucagon activity as a result of the substitution at position 22, however the insulin component of the conjugate provides blood glucose reducing activity such that the conjugate has approximately one fifth the activity of insulin. GluE3/DP8 has reduced glucagon activity due to the substitution at position E3, however the conjugate has glucose lowering activity that is slightly blunted relative to native insulin.

The application's sequence listing, which the Patent Office published only in electronic form, follows.

SEQUENCE LISTING (1921 sequences)

SEQ ID NO: 1 - protein, 21 aa, Homo sapiens
GIVEQCCTSICSLYQLENYCN

SEQ ID NO: 2 - protein, 30 aa, Homo sapiens
FVNQHLCGSHLVEALYLVCGERGFFYTPKT

SEQ ID NO: 3 - protein, 70 aa, Homo sapiens
GPETLCGAELVDALQFVCGDRGFYFNKPTGYGSSSRRAPQTGIVDECCFRSCDLRRLEMYCAPLKPAKSA

SEQ ID NO: 4 - protein, 67 aa, Homo sapiens
AYRPSETLCGGELVDTLQFVCGDRGFYFSRPASRVSRRSRGIVEECCFRSCDLALLETYCATPAKSE

SEQ ID NO: 5 - protein, 21 aa, Homo sapiens
GIVDECCFRSCDLRRLEMYCA

SEQ ID NO: 6 - protein, 30 aa, Homo sapiens
FGPETLCGAELVDALYLVCGDRGFYFNKPT

SEQ ID NO: 7 - protein, 21 aa, Homo sapiens
GIVEECCFRSCDLALLETYCA

SEQ ID NO: 8 - protein, 32 aa, Homo sapiens
AYRPSETLCGGELVDTLQFVCGDRGFYFSRPA

SEQ ID NO: 9 - protein, 8 aa, Artificial Sequence
  spacer sequence
  MISC_FEATURE (1)..(1): The Xaa at position 1 represents an amino acid selected from glycine, alanine, valine, leucine, isoleucine, proline, phenylalanine and methionine
  MISC_FEATURE (2)..(2): The Xaa at position 2 represents any amino acid other than tyrosine
  MISC_FEATURE (3)..(6): The Xaas at positions 3-6 are independently any amino acid
  MISC_FEATURE (7)..(8): The Xaas at positions 7 and 8 are independently selected from arginine, lysine or ornithine
XXXXXXXX

SEQ ID NO: 10 - protein, 8 aa, Artificial Sequence
  spacer sequence
  MISC_FEATURE (1)..(1): The Xaa at position 1 represents an amino acid selected from glycine, alanine, valine, leucine, isoleucine, proline, phenylalanine and methionine
  MISC_FEATURE (2)..(2): The Xaa at position 2 represents any amino acid other than tyrosine
  MISC_FEATURE (3)..(6): The Xaas at positions 3-6 are independently any amino acid
XXXXXXRR

SEQ ID NO: 11 - protein, 4 aa, Artificial Sequence
  spacer sequence
PGPE

SEQ ID NO: 12 - protein, 4 aa, Artificial Sequence
  spacer sequence
FVNQ

SEQ ID NO: 13 - protein, 5 aa, Artificial Sequence
  spacer sequence
  MISC_FEATURE (1)..(5): The Xaas at positions 1-5 are independently any amino acid
XXXXX

SEQ ID NO: 14 - protein, 6 aa, Artificial Sequence
  spacer sequence
AYRPSE

SEQ ID NO: 15 - protein, 4 aa, Artificial Sequence
  spacer sequence
  MISC_FEATURE (1)..(4): The Xaas at positions 1-4 are independently any amino acid
XXXX

SEQ ID NO: 16 - protein, 5 aa, Artificial Sequence
  spacer sequence
YTPKT

SEQ ID NO: 17 - protein, 12 aa, Homo sapiens
GYGSSSRRAPQT

SEQ ID NO: 18 - protein, 8 aa, Homo sapiens
GYGSSSRR

SEQ ID NO: 19 - protein, 21 aa, Artificial Sequence
  Analog of the insulin A chain
  MISC_FEATURE (4)..(4): Xaa at position 4 is aspartic acid or glutamic acid
  MISC_FEATURE (5)..(5): Xaa at position 5 is glutamine or glutamic acid
  MISC_FEATURE (8)..(8): Xaa at position 8 is histidine, threonine or phenylalanine
  MISC_FEATURE (9)..(9): Xaa at position 9 is serine, arginine, ornithine, lysine or alanine
  MISC_FEATURE (10)..(10): Xaa at position 10 is isoleucine or serine
  MISC_FEATURE (12)..(12): Xaa at position 12 is aspartic acid or serine
  MISC_FEATURE (14)..(14): Xaa at position 14 is tyrosine, arginine, ornathine, lysine or alanine
  MISC_FEATURE (15)..(15): Xaa at position 15 is glutamine, glutamic acid, arginine, ornithine, alanine, lysine or leucine
  MISC_FEATURE (17)..(17): Xaa at position 17 is glutamine or glutamic acid
  MISC_FEATURE (18)..(18): Xaa at position 18 is methionine, asparagine, glutamine, glutamic acid, aspartic acid or threonine
  MISC_FEATURE (21)..(21): Xaa at position 21 is alanine, glycine, serine, valine, threonine, isoleucine, leucine, glutamine, glutamic acid, asparagine, aspartic acid, histidine, tryptophan, tyrosine, or methionine
GIVXXCCXXXCXLXXLXXYCX

SEQ ID NO: 20 - protein, 21 aa, Artificial Sequence
  Analog of the insulin B chain
  MISC_FEATURE (1)..(1): Xaa at position 1 is histidine or threonine
  MISC_FEATURE (5)..(5): Xaa at position 5 is alanine, glycine or serine
  MISC_FEATURE (6)..(6): Xaa at position 6 is histidine, aspartic acid, glutamic acid, homocysteic acid or cysteic acid
  MISC_FEATURE (9)..(9): Xaa at position 9 is aspartic acid, glutamine or glutamic acid
  MISC_FEATURE (10)..(10): Xaa at position 10 is alanine or threonine
  MISC_FEATURE (17)..(17): Xaa at position 17 is glutamic acid, aspartic acid or asparagine
  MISC_FEATURE (18)..(18): Xaa at position 18 is alanine, ornithine, lysine or arginine
  MISC_FEATURE (21)..(21): Xaa at position 21 is tyrosine or 4-amino-phenylalanine
XLCGXXLVXXLYLVCGXXGFX

SEQ ID NO: 21 - protein, 8 aa, Artificial Sequence
  analog of IGF-1 C peptide
  MISC_FEATURE (7)..(8): The Xaas at positions 7 and 8 are independently arginine, lysine or ornithine
GYGSSSXX

SEQ ID NO: 22 - protein, 8 aa, Artificial Sequence
  Analog of IGF-1 C peptide
GAGSSSRR

SEQ ID NO: 23 - protein, 12 aa, Artificial Sequence
  linker sequence
GAGSSSRRAPQT

SEQ ID NO: 24 - protein, 8 aa, Homo sapiens
SRVSRRSR

SEQ ID NO: 25 - protein, 21 aa, Artificial Sequence
  Analog of the insulin B chain
  MISC_FEATURE (1)..(1): Xaa at position 1 is histidine or threonine
  MISC_FEATURE (5)..(5): Xaa at position 5 is alanine, glycine or serine
  MISC_FEATURE (6)..(6): Xaa at position 6 is histidine, aspartic acid, glutamic acid, homocysteic acid or cysteic acid
  MISC_FEATURE (9)..(9): Xaa at position 9 is aspartic acid or glutamic acid
  MISC_FEATURE (10)..(10): Xaa at position 10 is alanine or threonine
  MISC_FEATURE (18)..(18): Xaa at position 18 is alanine, ornithine, lysine or arginine
  MISC_FEATURE (21)..(21): Xaa at position 21 is tyrosine or phenylalanine
XLCGXXLVXXLYLVCGDXGFX

SEQ ID NO: 26 - protein, 7 aa, Artificial Sequence
  amino acid terminal extension for insulin
  MISC_FEATURE (2)..(6): the Xaas at positions 2-6 are independently glutamic acid or aspartic acid
GXXXXXK

SEQ ID NO: 27 - protein, 7 aa, Artificial Sequence
  amio acid terminal extension for insulin
  MISC_FEATURE (1)..(5): the Xaas at positions 1-5 are independently glutamic acid or aspartic acid
XXXXXRK

SEQ ID NO: 28 - protein, 31 aa, Artificial Sequence
  Analog of IGF-1 B chain
  MISC_FEATURE (28)..(28): The Xaa at position 28 is alanine lysine, ornithine or arginine
GEEEEEKGPEHLCGAHLVDALYLVCGDXGFY

SEQ ID NO: 29 - protein, 21 aa, Artificial Sequence
  Analog of the insulin A chain
  MISC_FEATURE (4)..(4): Xaa at position 4 is aspartic acid or glutamic acid
  MISC_FEATURE (5)..(5): Xaa at position 5 is glutamine or glutamic acid
  MISC_FEATURE (8)..(8): Xaa at position 8 is histidine, threonine or phenylalanine
  MISC_FEATURE (9)..(9): Xaa at position 9 is serine, arginine, ornithine, lysine or alanine
  MISC_FEATURE (10)..(10): Xaa at position 10 is isoleucine or serine
  MISC_FEATURE (12)..(12): Xaa at position 12 is aspartic acid or serine
  MISC_FEATURE (14)..(14): Xaa at position 14 is tyrosine, arginine, ornathine, lysine or alanine
  MISC_FEATURE (15)..(15): Xaa at position 15 is glutamine, glutamic acid, arginine, ornithine, alanine, lysine or leucine
  MISC_FEATURE (17)..(17): Xaa at position 17 is glutamine or glutamic acid
  MISC_FEATURE (18)..(18): Xaa at position 18 is methionine, asparagine, glutamine, glutamic acid, aspartic acid or threonine
  MISC_FEATURE (19)..(19): Xaa at position 19 is tyrosine, 4-methoxy phenylalanine  or 4-amino-phenylalanine
  MISC_FEATURE (21)..(21): Xaa at position 21 is alanine, glycine, serine, valine, threonine, isoleucine, leucine, glutamine, glutamic acid, asparagine, aspartic acid, histidine, tryptophan, tyrosine, or methionine
GIVXXCCXXXCXLXXLXXXCX

SEQ ID NO: 30 - protein, 21 aa, Artificial Sequence
  Analog of insulin A chain
  MISC_FEATURE (8)..(8): Xaa at position 8 is  threonine or histidine
  MISC_FEATURE (19)..(19): Xaa at position 19 is tyrosine, 4-methoxy-phenylalanine or 4-amino phenylalanine
  MISC_FEATURE (21)..(21): Xaa at position 21 is asparagine or glycine
GIVEQCCXSICSLYQLENXCX

SEQ ID NO: 31 - protein, 21 aa, Artificial Sequence
  Analog of insulin B chain
  MISC_FEATURE (1)..(1): Xaa at position 1 is histidine or threonine
  MISC_FEATURE (5)..(5): Xaa at position 5 is alanine, glycine or serine
  MISC_FEATURE (6)..(6): Xaa at position 6 is histidine, aspartic acid, glutamic acid, homocysteic acid or cysteic acid
XLCGXXLVEALYLVCGERGFF

SEQ ID NO: 32 - protein, 21 aa, Artificial Sequence
  Analog of the insulin A chain
  MISC_FEATURE (8)..(8): Xaa at position 8 is histidine or threonine
  MISC_FEATURE (17)..(17): Xaa at position 17 is glutamine or glutamic acid
  MISC_FEATURE (19)..(19): Xaa at position 19 is tyrosine, 4-methoxy phenylalanine  or 4-amino-phenylalanine
  MISC_FEATURE (21)..(21): Xaa at position 21 is asparagine or glycine
GIVEQCCXSICSLYQLXNXCX

SEQ ID NO: 33 - protein, 21 aa, Artificial Sequence
  Analog of the insulin B chain
  MISC_FEATURE (1)..(1): Xaa at position 1 is histidine or threonine
  MISC_FEATURE (5)..(5): Xaa at position 5 is alanine, glycine or serine
  MISC_FEATURE (6)..(6): Xaa at position 6 is histidine, aspartic acid, glutamic acid, homocysteic acid or cysteic acid
XLCGXXLVEALYLVCGERGFF

SEQ ID NO: 34 - protein, 27 aa, Artificial Sequence
  Analog of the insulin B chain
  MISC_FEATURE (1)..(1): Xaa at position 1 is phenylalanine and desamino-phenylalanine
  MISC_FEATURE (5)..(5): Xaa at position 5 is histidine and threonine
  MISC_FEATURE (9)..(9): Xaa at position 9 is alanine, glycine or serine
  MISC_FEATURE (10)..(10): Xaa at position 10 is histidine, aspartic acid, glutamic acid, homocysteic acid or cysteic acid
XVNQXLCGXXLVEALYLVCGERGFFYT

SEQ ID NO: 35 - protein, 21 aa, Artificial Sequence
  Analog of the insulin A chain
  MISC_FEATURE (8)..(8): Xaa at position 8 is histidine or phenylalnine
  MISC_FEATURE (9)..(9): Xaa at position 9 is arginine, lysine, ornithine or alanine
  MISC_FEATURE (14)..(14): Xaa at position 14 is arginine, lysine, ornithine or alanine
  MISC_FEATURE (15)..(15): Xaa at position 15 is arginine, lysine, ornithine or leucine
  MISC_FEATURE (17)..(17): Xaa at position 17 is glutamine or glutamic acid
  MISC_FEATURE (18)..(18): Xaa at position 18 is methionine, asparagine or threonine
  MISC_FEATURE (19)..(19): Xaa at position 19 is tyrosine, 4-methoxy phenylalanine  or 4-amino-phenylalanine
  MISC_FEATURE (21)..(21): Xaa at position 21 is alanine, glycine or asparagine
GIVDECCXXSCDLXXLXXXCX

SEQ ID NO: 36 - protein, 21 aa, Artificial Sequence
  Analog of the insulin B chain
  MISC_FEATURE (1)..(1): Xaa at position 1 is histidine or threonine
  MISC_FEATURE (5)..(5): Xaa at position 5 is alanine, glycine or serine
  MISC_FEATURE (6)..(6): Xaa at position 6 is histidine, aspartic acid, glutamic acid, homocysteic acid or cysteic acid
  MISC_FEATURE (9)..(9): Xaa at position 9 is aspartic acid or glutamic acid
  MISC_FEATURE (10)..(10): Xaa at position 10 is alanine or threonine
  MISC_FEATURE (18)..(18): Xaa at position 18 is alanine, ornithine, lysine or arginine
  MISC_FEATURE (21)..(21): Xaa at position 21 is tyrosine or phenylalanine
XLCGXXLVXXLYLVCGDXGFX

SEQ ID NO: 37 - protein, 21 aa, Artificial Sequence
  Analog of the insulin A chain
  MISC_FEATURE (9)..(9): Xaa at position 9 is arginine, ornithine, or lysine
  MISC_FEATURE (14)..(14): Xaa at position 14 is arginine, ornithine, or lysine
  MISC_FEATURE (15)..(15): Xaa at position 15 is arginine, ornithine, or lysine
  MISC_FEATURE (17)..(17): Xaa at position 17 is glutamine or glutamic acid
  MISC_FEATURE (19)..(19): Xaa at position 19 is tyrosine, 4-methoxy phenylalanine  or 4-amino-phenylalanine
  MISC_FEATURE (21)..(21): Xaa at position 21 is alanine, glycine or asparagine
GIVDECCHXSCDLXXLXMXCX

SEQ ID NO: 38 - protein, 21 aa, Artificial Sequence
  Analog of the insulin B chain
  MISC_FEATURE (1)..(1): Xaa at position 1 is histidine or threonine
  MISC_FEATURE (6)..(6): Xaa at position 6 is histidine, aspartic acid, or glutamic acid
  MISC_FEATURE (18)..(18): Xaa at position 18 is alanine, ornithine, lysine or arginine
  MISC_FEATURE (21)..(21): Xaa at position 21 is tyrosine or phenylalanine
XLCGAXLVDALYLVCGDXGFX

SEQ ID NO: 39 - protein, 21 aa, Artificial Sequence
  analog of insulin B chain
  MISC_FEATURE (18)..(18): The Xaa at position 18 is ornithine, lysine or arginine
HLCGAELVDALYLVCGDXGFY

SEQ ID NO: 40 - protein, 24 aa, Artificial Sequence
  analog of IGF-1 B chain
  MISC_FEATURE (21)..(21): The Xaa at position 21 is ornithine, lysine or arginine
GPEHLCGAELVDALYLVCGDXGFY

SEQ ID NO: 41 - protein, 29 aa, Artificial Sequence
  Analog of IGF-1 B chain
  MISC_FEATURE (21)..(21): The Xaa at position 21 is ornithine, lysine or arginine
GPEHLCGAELVDALYLVCGDXGFYFNPKT

SEQ ID NO: 42 - protein, 29 aa, Artificial Sequence
  Analog of IGF-1 B chain
  MISC_FEATURE (21)..(21): The Xaa at position 21 is ornithine, lysine or arginine
GPEHLCGAELVDALYLVCGDXGFYFNKPT

SEQ ID NO: 43 - protein, 21 aa, Artificial Sequence
  Analog of the insulin A chain
  MISC_FEATURE (9)..(9): Xaa at position 9 is arginine, ornithine, or lysine
  MISC_FEATURE (14)..(14): Xaa at position 14 is arginine, ornithine, or lysine
  MISC_FEATURE (15)..(15): Xaa at position 15 is arginine, ornithine, or lysine
GIVDECCHXSCDLXXLQMYCN

SEQ ID NO: 44 - protein, 21 aa, Artificial Sequence
  Analog of the insulin A chain
  MISC_FEATURE (8)..(8): Xaa at position 8 is threonine, histidine or phenylalnine
  MISC_FEATURE (19)..(19): Xaa at position 19 is tyrosine, 4-methoxy phenylalanine  or 4-amino-phenylalanine
GIVDECCXRSCDLYQLENXCN

SEQ ID NO: 45 - protein, 21 aa, Artificial Sequence
  Analog of the insulin B chain
  MISC_FEATURE (1)..(1): Xaa at position 1 is histidine or threonine
  MISC_FEATURE (18)..(18): Xaa at position 18 is alanine, ornithine, lysine or arginine
  MISC_FEATURE (21)..(21): Xaa at position 21 is tyrosine, histidine, asparagine or phenylalanine
XLCGSHLVDALYLVCGDXGFX

SEQ ID NO: 46 - protein, 21 aa, Artificial Sequence
  Analog of the insulin A chain
  MISC_FEATURE (19)..(19): Xaa at position 19 is tyrosine, 4-methoxy phenylalanine  or 4-amino-phenylalanine
  MISC_FEATURE (21)..(21): Xaa at position 21 is alanine, glycine or asparagine
GIVEQCCHSICSLYQLENXCX

SEQ ID NO: 47 - protein, 21 aa, Homo sapiens
  MISC_FEATURE (19)..(19): The Xaa at position 19 is tyrosine, 4-methoxy-phenylalanine or 4-amino phenylalanine
  MISC_FEATURE (21)..(21): The Xaa at position 21 is alanine, glycine or asparagine
GIVDECCHRSCDLRRLEMXCX

SEQ ID NO: 48 - protein, 29 aa, Homo sapiens
GPETLCGAELVDALYLVCGDRGFYFNPKT

SEQ ID NO: 49 - protein, 8 aa, Artificial Sequence
  linker sequence
  MISC_FEATURE (1)..(1): Xaa at position1 is glycine, alanine, valine, leucine, isoleucine, proline, phenylalanine and methionine
  MISC_FEATURE (2)..(2): Xaa at position 2 is any non-aromatic amino acid
  MISC_FEATURE (7)..(8): Xaas at positions 7 and 8 are independently arginine, lysine or ornithine
XXGSSSXX

SEQ ID NO: 50 - protein, 12 aa, Artificial Sequence
  linker sequence
  MISC_FEATURE (1)..(1): Xaa at position1 is glycine, alanine, valine, leucine, isoleucine, proline, phenylalanine and methionine
  MISC_FEATURE (2)..(2): Xaa at position 2 is any non-aromatic amino acid
  MISC_FEATURE (7)..(8): Xaas at positions 7 and 8 are independently arginine, lysine or ornithine
XXGSSSXXAPQT

SEQ ID NO: 51 - protein, 29 aa, Homo sapiens
SSSSRAPPPSLPSPSRLPGPSDTPILPQK

SEQ ID NO: 52 - protein, 29 aa, Homo sapiens
SSSSKAPPPSLPSPSRLPGPSDTPILPQR

SEQ ID NO: 53 - protein, 8 aa, Artificial Sequence
  linker sequence
  MISC_FEATURE (1)..(1): Xaa at position 1 is glycine, alanine, valine, leucine, isoleucine, proline, phenylalanine and methionine
  MISC_FEATURE (2)..(2): Xaa at position 2 is any non-aromatic amino acid
XXGSSSRR

SEQ ID NO: 54 - protein, 12 aa, Artificial Sequence
  Analog of IGF-1 C peptide
  MISC_FEATURE (8)..(8): The Xaa at position 8 is arginine, lysine or ornithine
GAGSSSRXAPQT

SEQ ID NO: 55 - protein, 12 aa, Artificial Sequence
  linker sequence
  MISC_FEATURE (2)..(2): Xaa at position 2 is any non-aromatic amino acid
  MISC_FEATURE (8)..(8): Xaa at position 8 is arginine, lysine or ornithine
GXGSSSRXAPQT

SEQ ID NO: 56 - protein, 8 aa, Artificial Sequence
  linker sequence
  MISC_FEATURE (2)..(2): Xaa at position 2 is any non-aromatic amino acid
GXGSSSRR

SEQ ID NO: 57 - protein, 9 aa, Artificial Sequence
  linker sequence
GAGSSSRRA

SEQ ID NO: 58 - protein, 10 aa, Artificial Sequence
  linker sequence
GAGSSSRRAP

SEQ ID NO: 59 - protein, 11 aa, Artificial Sequence
  Analog of IGF-1 C peptide
GAGSSSRRAPQ

SEQ ID NO: 60 - protein, 12 aa, Artificial Sequence
  linker sequence
GAGSSSRRAPQT

SEQ ID NO: 61 - protein, 8 aa, Artificial Sequence
  linker sequence
PYGSSSRR

SEQ ID NO: 62 - protein, 8 aa, Artificial Sequence
  linker sequence
PAGSSSRR

SEQ ID NO: 63 - protein, 9 aa, Artificial Sequence
  linker sequence
PAGSSSRRA

SEQ ID NO: 64 - protein, 10 aa, Artificial Sequence
  linker sequence
PAGSSSRRAP

SEQ ID NO: 65 - protein, 11 aa, Artificial Sequence
  linker sequence
PAGSSSRRAPQ

SEQ ID NO: 66 - protein, 12 aa, Artificial Sequence
  linker sequence
PAGSSSRRAPQT

SEQ ID NO: 67 - protein, 28 aa, Homo sapiens
SSSSRAPPPSLPSPSRLPGPSDTPILPQ

SEQ ID NO: 68 - protein, 29 aa, Homo sapiens
  MISC_FEATURE (5)..(5): Xaa at position 5 is lysine or Arginine
  MISC_FEATURE (29)..(29): Xaa at position 29 is lysine or Arginine
SSSSXAPPPSLPSPSRLPGPSDTPILPQX

SEQ ID NO: 69 - protein, 12 aa, Artificial Sequence
  linker sequence
  MISC_FEATURE (7)..(8): Xaas at positions 7 and 8 are independently arginine, lysine or ornithine
GYGSSSXXAPQT

SEQ ID NO: 70 - protein, 4 aa, Homo sapiens
YTPK

SEQ ID NO: 71 - protein, 4 aa, Homo sapiens
FNKP

SEQ ID NO: 72 - protein, 29 aa, Artificial Sequence
  glucagon analogue
  MISC_FEATURE (1)..(1): Xaa at position 1 = His, D-histidine, desaminohistidine, hydroxyl-histidine, acetyl-	histidine, homo-histidine or alpha, alpha-dimethyl imidiazole acetic acid (DMIA), 	N-methyl histidine, alpha-methyl histidine, or imidazole acetic acid
  MISC_FEATURE (2)..(2): Xaa at position 2 = Ser, D-serine, Ala, D-alanine, Val, glycine, n-methyl serine, 	aminoisobutyric acid (AIB) or N-methyl alanine
  MISC_FEATURE (3)..(3): Xaa at position 3 is Gln, Glu, Orn or  Nle
  MISC_FEATURE (10)..(10): Xaa at position 10 = Tyr, Val or Trp
  MISC_FEATURE (12)..(12): Xaa at position 12 = Ser, Lys or Arg
  MISC_FEATURE (15)..(15): Xaa at position 15 = Asp, Glu, cysteic acid, homoglutamic acid and homocysteic acid
  MISC_FEATURE (16)..(16): Xaa at position 16 = Ser, Gly, Glu, Gln, homoglutamic acid or homocysteic acid
  MISC_FEATURE (17)..(17): Xaa at position 17 = Arg, Gln, Lys, Cys, Orn, homocycstein or acetyl phenylalanine
  MISC_FEATURE (18)..(18): Xaa at position 18 = Arg, Ala,Lys, Cys, Orn, homocycstein or acetyl phenylalanine
  MISC_FEATURE (20)..(20): Xaa at position 20 = Gln, Lys, arginine, ornithine or citrulline
  MISC_FEATURE (21)..(21): Xaa at position 21 = Gln, Glu, Asp, Lys, Cys, Orn, homocycstein or acetyl phenyalanine
  MISC_FEATURE (23)..(23): Xaa at position 23 is Val or Ile
  MISC_FEATURE (24)..(24): Xaa at position 24 = Ala, Gln, Glu, Lys, Cys, Orn, homocycstein or acetyl phenyalanine
  MISC_FEATURE (27)..(27): Xaa at position 27 = Met, Leu, Val or Nle
  MISC_FEATURE (28)..(28): Xaa at position 28 = Asn, Lys or Asp
  MISC_FEATURE (29)..(29): Xaa at position 29 is Thr, Gly, Lys, Cys, Orn, homocycstein or acetyl phenyalanine
XXXGTFTSDXSXYLXXXXAXXFXXWLXXX

SEQ ID NO: 73 - protein, 21 aa, Artificial Sequence
  Analog of Insulin A chain
  MISC_FEATURE (8)..(8): Xaa at position 8 is  threonine or histidine
  MISC_FEATURE (9)..(9): Xaa at position 9 is  valine or tyrosine
  MISC_FEATURE (21)..(21): Xaa at position 21 is asparagine or glycine
GIVEQCCXXICSLYQLENYCX

SEQ ID NO: 74 - protein, 21 aa, Artificial Sequence
  Analog of the insulin A chain
  MISC_FEATURE (8)..(8): Xaa at position 8 is histidine or phenylalnine
  MISC_FEATURE (9)..(9): Xaa at position 9 is arginine, lysine, ornithine or alanine
  MISC_FEATURE (19)..(19): Xaa at position 19 is tyrosine, 4-methoxy phenylalanine  or 4-amino-phenylalanine
  MISC_FEATURE (21)..(21): Xaa at position 21 is alanine, glycine or asparagine
GIVDECCXXSCDLRRLEMXCX

SEQ ID NO: 75 - protein, 21 aa, Artificial Sequence
  Analog of the insulin B chain
  MISC_FEATURE (1)..(1): Xaa at position 1 is histidine or threonine
  MISC_FEATURE (6)..(6): Xaa at position 6 is histidine, aspartic acid, glutamic acid, homocysteic acid or cysteic acid
  MISC_FEATURE (18)..(18): Xaa at position 18 is alanine, ornithine, lysine or arginine
  misc_feature (21)..(21): Xaa can be any naturally occurring amino acid
XLCGAXLVDALYLVCGDXGFX

SEQ ID NO: 76 - protein, 8 aa, Artificial Sequence
  Analog of IGF-1 C peptide
  MISC_FEATURE (7)..(8): The Xaas at positions 7 and 8 are independently arginine, lysine or ornithine
GAGSSSXX

SEQ ID NO: 77 - protein, 12 aa, Artificial Sequence
  Analog of IGF-1 C peptide
  MISC_FEATURE (7)..(8): The Xaas at positions 7 and 8 are independently arginine, lysine or ornithine
GYGSSSXXAPQT

SEQ ID NO: 78 - protein, 10 aa, Artificial Sequence
  peptide fragment representing the carboxy terminal 10 amino acids of Exendin-4
GPSSGAPPPS

SEQ ID NO: 79 - protein, 10 aa, Artificial Sequence
  peptide fragment representing the carboxy terminal 10 amino acids of Exendin-4
  MOD_RES (10)..(10): AMIDATION
GPSSGAPPPS

SEQ ID NO: 80 - protein, 11 aa, Artificial Sequence
  peptide fragment representing the carboxy terminal 10 amino acids of Exendin-4
  MISC_FEATURE (11)..(11): pegylated
GPSSGAPPPSC

SEQ ID NO: 81 - protein, 29 aa, Homo sapiens
  MISC_FEATURE (15)..(15): Xaa at position 15 = Asp, Glu, homoglutamic acid, cysteic acid or homocysteic acid
  MISC_FEATURE (16)..(16): Xaa at position 16 = Ser, Glu, Gln, homoglutamic acid or homocysteic acid
  MISC_FEATURE (20)..(20): Xaa at position 20 = Gln or Lys
  MISC_FEATURE (24)..(24): Xaa at position 24 = Gln or Glu
  MISC_FEATURE (28)..(28): Xaa at position 28 = Asn, Lys or an acidic amino acid
  MISC_FEATURE (29)..(29): Xaa at position 29 = Thr, Gly or an acidic amino acid
HSQGTFTSDYSKYLXXRRAXDFVXWLMXX

SEQ ID NO: 82 - protein, 29 aa, Homo sapiens
  MISC_FEATURE (15)..(15): Xaa at position 15 = Asp, Glu, cysteic acid, homoglutamic acid or homocysteic acid
  MISC_FEATURE (16)..(16): Xaa at position 16 = Ser, Glu, Gln, homoglutamic acid or homocysteic acid
  MISC_FEATURE (20)..(20): Xaa at position 20 = Gln or Lys
  MISC_FEATURE (24)..(24): Xaa at position 24 = Gln or Glu
  MISC_FEATURE (28)..(28): Xaa at position 28 = Asn, Asp or Lys
  MISC_FEATURE (29)..(29): Xaa at position 29 is Thr or Gly
HSQGTFTSDYSKYLDXRRAXDFVXWLMXX

SEQ ID NO: 83 - protein, 29 aa, Artificial Sequence
  glucagon analogue
  MISC_FEATURE (3)..(3): Xaa at position 3= Glu, Orn or Nle
  MISC_FEATURE (15)..(15): Xaa at position 15 = Asp, Glu, homoglutamic acid, cysteic acid or homocysteic acid
  MISC_FEATURE (16)..(16): Xaa at position 16 = Ser, Glu, Gln, homoglutamic acid or homocysteic acid
  MISC_FEATURE (20)..(20): Xaa at position 20 = Gln or Lys
  MISC_FEATURE (24)..(24): Xaa at position 24 = Gln or Glu
  MISC_FEATURE (28)..(28): Xaa at position 28 = Asn, Lys or an acidic amino acid
  MISC_FEATURE (29)..(29): Xaa at position 29 = Thr or an acidic amino acid
HSXGTFTSDYSKYLXXRRAXDFVXWLMXX

SEQ ID NO: 84 - protein, 29 aa, Artificial Sequence
  Glucagon analogue
  MISC_FEATURE (15)..(15): Xaa at position 15 is Glu or Asp
  MISC_FEATURE (28)..(28): Xaa at position 28 is Glu or Asp
  MOD_RES (29)..(29): AMIDATION
HSQGTFTSDYSKYLXERRAQDFVQWLMXT

SEQ ID NO: 85 - protein, 29 aa, Artificial Sequence
  glucagon analogue
  MISC_FEATURE (12)..(16): lactam ring formed between side chain of Lys 12 and Glu 16
  MISC_FEATURE (15)..(15): Xaa at position 15 is Glu or Asp
  MISC_FEATURE (28)..(28): Xaa at position 28 is Glu or Asp
  MOD_RES (29)..(29): AMIDATION
HSQGTFTSDYSKYLXERRAQDFVQWLMXT

SEQ ID NO: 86 - protein, 29 aa, Artificial Sequence
  glucagon analogue
  MISC_FEATURE (15)..(15): Xaa at position 15 is Glu or Asp
  MISC_FEATURE (16)..(20): lactam ring formed between side chain of Glu 16 and Lys 20
  MISC_FEATURE (28)..(28): Xaa at position 28 is Glu or Asp
  MOD_RES (29)..(29): AMIDATION
HSQGTFTSDYSKYLXERRAKDFVQWLMXT

SEQ ID NO: 87 - protein, 29 aa, Artificial Sequence
  glucagon analogue
  MISC_FEATURE (15)..(15): Xaa at position 15 is Glu or Asp
  MISC_FEATURE (20)..(24): lactam ring formed between side chain of Lys 20 and Glu 24
  MISC_FEATURE (28)..(28): Xaa at position 28 is Glu or Asp
  MOD_RES (29)..(29): AMIDATION
HSQGTFTSDYSKYLXSRRAKDFVEWLMXT

SEQ ID NO: 88 - protein, 29 aa, Artificial Sequence
  glucagon analogue
  MISC_FEATURE (15)..(15): Xaa at position 15 is Glu or Asp
  MISC_FEATURE (24)..(28): lactam ring formed between side chain of Glu 24 and Lys 28
  MISC_FEATURE (29)..(29): Xaa at position 29 is Glu or Thr
  MOD_RES (29)..(29): AMIDATION
HSQGTFTSDYSKYLXSRRAQDFVEWLMKX

SEQ ID NO: 89 - protein, 29 aa, Homo sapiens
  MISC_FEATURE (27)..(27): Xaa at position 27 is Met, Leu or Nle
HSQGTFTSDYSKYLDSRRAQDFVQWLXNT

SEQ ID NO: 90 - protein, 29 aa, Artificial Sequence
  glucagon analogue
  MISC_FEATURE (16)..(16): Xaa is Glu, Gln, homoglutamic acid or homocysteic acid
  MISC_FEATURE (17)..(17): Xaa is Arg, Cys, Orn, homocysteine or acetyl phenylalanine
  MISC_FEATURE (27)..(27): Xaa at position 27 is Met, Leu or Nle
HSQGTFTSDYSKYLDXXRAQDFVQWLXNT

SEQ ID NO: 91 - protein, 29 aa, Artificial Sequence
  Glucagon analogue
  MISC_FEATURE (16)..(16): Xaa is Glu, Gln, homoglutamic acid or homocysteic acid
  MISC_FEATURE (21)..(21): Xaa is Asp, Cys, Orn, homocysteine or acetyl phenyalanine
  MISC_FEATURE (27)..(27): Xaa at position 27 is Met, Leu or Nle
HSQGTFTSDYSKYLDXRRAQXFVQWLXNT

SEQ ID NO: 92 - protein, 29 aa, Artificial Sequence
  glucagon analog
  MISC_FEATURE (16)..(16): Xaa is Glu, Gln, homoglutamic acid or homocysteic acid
  MISC_FEATURE (24)..(24): Xaa is Gln, Cys, Orn, homocysteine or acetyl phenylalanine
  MISC_FEATURE (27)..(27): Xaa at postion 27 is Met, Leu or Nle
HSQGTFTSDYSKYLDXRRAQDFVXWLXNT

SEQ ID NO: 93 - protein, 29 aa, Artificial Sequence
  Glucagon analogue
  MISC_FEATURE (16)..(16): Xaa is Glu, Gln, homoglutamic acid or homocysteic acid
  MISC_FEATURE (21)..(21): Xaa is Asp, Cys, Orn, homocysteine or acetyl phenyalanine
  MISC_FEATURE (24)..(24): Xaa is Gln, Cys, Orn, homocysteine or acetyl phenyalanine
  MISC_FEATURE (27)..(27): Xaa at position 27 is Met, Leu or Nle
HSQGTFTSDYSKYLDXRRAQXFVXWLXNT

SEQ ID NO: 94 - protein, 29 aa, Artificial Sequence
  Glucagon analogue
  MISC_FEATURE (21)..(21): Xaa is Asp, Cys, Orn, homocysteine or acetyl phenyalanine
  MISC_FEATURE (27)..(27): Xaa is Met, Leu or Nle
HSQGTFTSDYSKYLDERRAQXFVQWLXNT

SEQ ID NO: 95 - protein, 29 aa, Artificial Sequence
  Glucagon analogue
  MISC_FEATURE (24)..(24): Xaa at position 24 is Gln, Cys, Orn, homocysteine or acetyl phenylalanine
  MISC_FEATURE (27)..(27): Xaa at position 27 is Met, Leu or Nle
HSQGTFTSDYSKYLDERRAQDFVXWLXNT

SEQ ID NO: 96 - protein, 29 aa, Artificial Sequence
  Glucagon analogue
  MISC_FEATURE (16)..(16): Xaa at position 16 is Glu, Gln, homoglutamic acid or homocysteic acid
HSQGTFTSDYSKYLDXRRAQDFVQWLMNT

SEQ ID NO: 97 - protein, 29 aa, Artificial Sequence
  Glucagon analogue
  MISC_FEATURE (27)..(27): Xaa at position 27 = Met, Leu or Nle
HSQGTFTSDYSKYLDERRAQDFVQWLXNT

SEQ ID NO: 98 - protein, 29 aa, Artificial Sequence
  Glucagon analogue
HSQGTFTSDYSKYLDERRAQDFVQWLMNT

SEQ ID NO: 99 - protein, 29 aa, Artificial Sequence
  Glucagon analogue
  MOD_RES (29)..(29): AMIDATION
HSQGTFTSDYSKYLDERRAQDFVQWLMNT

SEQ ID NO: 100 - protein, 29 aa, Artificial Sequence
  glucagon analogue
  MISC_FEATURE (12)..(16): lactam ring formed between side chain of Lys 12 and Glu 16
HSQGTFTSDYSKYLDERRAQDFVQWLMNT

SEQ ID NO: 101 - protein, 29 aa, Artificial Sequence
  glucagon analogue
  MISC_FEATURE (16)..(20): lactam ring formed between side chain of Glu 16 and Lys 20
HSQGTFTSDYSKYLDERRAKDFVQWLMNT

SEQ ID NO: 102 - protein, 29 aa, Artificial Sequence
  glucagon analogue
  MISC_FEATURE (20)..(24): lactam ring formed between side chain of Lys 20 and Glu 24
HSQGTFTSDYSKYLDSRRAKDFVEWLMNT

SEQ ID NO: 103 - protein, 29 aa, Homo sapiens
  MISC_FEATURE (24)..(28): lactam ring formed between side chain of Glu 24 and Lys 28
HSQGTFTSDYSKYLDSRRAQDFVEWLMKT

SEQ ID NO: 104 - protein, 29 aa, Homo sapiens
  MISC_FEATURE (12)..(16): lactam ring formed between side chain of Lys 12 and Glu 16
  MISC_FEATURE (20)..(24): lactam ring formed between side chain of Lys 20 and Glu 24
HSQGTFTSDYSKYLDERRAKDFVEWLMNT

SEQ ID NO: 105 - protein, 29 aa, Homo sapiens
  MISC_FEATURE (16)..(20): lactam ring formed between side chain of Lys 12 and Glu 16
  MISC_FEATURE (24)..(28): lactam ring formed between side chain of Glu 24 and Lys 28
HSQGTFTSDYSKYLDERRADDFVEWLMKT

SEQ ID NO: 106 - protein, 29 aa, Homo sapiens
  MISC_FEATURE (16)..(20): lactam ring formed between side chain of Glu 16 and Lys 20
  MISC_FEATURE (24)..(28): lactam ring formed between side chain of Glu 24 and Lys 28
HSQGTFTSDYSKYLDERRAKDFVEWLMKT

SEQ ID NO: 107 - protein, 30 aa, Artificial Sequence
  Glucagon analogue
  MISC_FEATURE (30)..(30): Xaa = any amino acid
  MOD_RES (30)..(30): AMIDATION
HSQGTFTSDYSKYLDERRAQDFVQWLMNTX

SEQ ID NO: 108 - protein, 29 aa, Homo sapiens
  MISC_FEATURE (16)..(16): Xaa at position 16 = Ser, Glu, Gln, homoglutamic acid or homocysteic acid
  MISC_FEATURE (20)..(20): Xaa at position 20 = glutamine, lysine, arginine, ornithine or citrulline
  MISC_FEATURE (24)..(24): Xaa at position 24 = Gln or Glu
  MISC_FEATURE (28)..(28): Xaa at position 28 = Asn, Asp or Lys
  MISC_FEATURE (29)..(29): Xaa at position 29 = Thr or Gly
HSQGTFTSDYSKYLDXRRAXDFVXWLMXX

SEQ ID NO: 109 - protein, 29 aa, Artificial Sequence
  glucagon analogue
  MISC_FEATURE (12)..(16): lactam ring formed between side chain of Lys 12 and Glu 16
  MISC_FEATURE (28)..(28): Xaa at position 28 is Asp or Asn
  MISC_FEATURE (29)..(29): Xaa at position 29 is Thr or Gly
HSQGTFTSDYSKYLDERRAQDFVQWLMXX

SEQ ID NO: 110 - protein, 29 aa, Artificial Sequence
  glucagon analogue
  MISC_FEATURE (16)..(20): lactam ring formed between side chain of Glu 16 and Lys 20
  MISC_FEATURE (28)..(28): Xaa at position 28 is Asp or Asn
  MISC_FEATURE (29)..(29): Xaa at position 29 is Thr or Gly
HSQGTFTSDYSKYLDERRAKDFVQWLMXX

SEQ ID NO: 111 - protein, 29 aa, Artificial Sequence
  glucagon analogue
  MISC_FEATURE (20)..(24): lactam ring formed between side chain of Lys 20 and Glu 24
  MISC_FEATURE (28)..(28): Xaa at position 28 is Asp or Asn
  MISC_FEATURE (29)..(29): Xaa at position 29 is Thr or Gly
HSQGTFTSDYSKYLDSRRAKDFVEWLMXX

SEQ ID NO: 112 - protein, 29 aa, Artificial Sequence
  glucagon analogue
  MISC_FEATURE (24)..(28): lactam ring formed between side chain of Glu 24 and Lys 28
  MISC_FEATURE (29)..(29): Xaa at position 29 is Thr or Gly
HSQGTFTSDYSKYLDSRRAQDFVEWLMKX

SEQ ID NO: 113 - protein, 29 aa, Homo sapiens
  MISC_FEATURE (16)..(16): Xaa at position 16 = Ser, Glu, Gln, homoglutamic acid or homocysteic acid
  MISC_FEATURE (20)..(20): Xaa at position 20 = glutamine, lysine, arginine, ornithine or citrulline
  MISC_FEATURE (24)..(24): Xaa at position 24 = Gln or Glu
  MISC_FEATURE (28)..(28): Xaa at position 28 = Asn, Asp or Lys
  MISC_FEATURE (29)..(29): Xaa at position 29 = Thr or Gly
HSQGTFTSDYSKYLDXRRAXDFVXWLMXX

SEQ ID NO: 114 - protein, 29 aa, Homo sapiens
HSQGTFTSDYSKYLDERRAKDFVQWLMNT

SEQ ID NO: 115 - protein, 29 aa, Artificial Sequence
  glucagon analogue
HSQGTFTSDYSKYLDSRRAKDFVEWLMNT

SEQ ID NO: 116 - protein, 29 aa, Artificial Sequence
  glucagon analogue
HSQGTFTSDYSKYLDSRRAQDFVEWLMKT

SEQ ID NO: 117 - protein, 8 aa, Artificial Sequence
  peptide fragment representing the carboxy terminal 8 amino acids of oxyntomodulin
KRNRNNIA

SEQ ID NO: 118 - protein, 4 aa, Artificial Sequence
  peptide fragment representing the amino 4 amino acids of oxyntomodulin carboxy terminus of SEQ ID NO: 27
KRNR

SEQ ID NO: 119 - protein, 29 aa, homo sapiens
HSQGTFTSDYSKYLDERRAKDFVQWLMNT

SEQ ID NO: 120 - protein, 29 aa, Artificial Sequence
  glucagon analogue
  MISC_FEATURE (1)..(1): Xaa at position 1 = His, D-histidine, desaminohistidine, hydroxyl-histidine, acetyl-	histidine, homo-histidine or alpha, alpha-dimethyl imidiazole acetic acid (DMIA), 	N-methyl histidine, alpha-methyl histidine, or imidazole acetic acid
  MISC_FEATURE (2)..(2): Xaa at position 2 = Ser, D-serine, Ala, D-alanine, Val, glycine, n-methyl serine, 	aminoisobutyric acid (AIB) or N-methyl alanine
  MISC_FEATURE (3)..(3): Xaa at position 3 is Gln, Glu, Orn or  Nle
  MISC_FEATURE (15)..(15): Xaa at position 15 = Asp, Glu, cysteic acid, homoglutamic acid and homocysteic acid
  MISC_FEATURE (16)..(16): Xaa at position 16 = Ser, Glu, Gln, homoglutamic acid or homocysteic acid
  MISC_FEATURE (20)..(20): Xaa at position 20 = Gln, Lys, arginine, ornithine or citrulline
  MISC_FEATURE (21)..(21): Xaa at position 21 = Gln, Glu, Asp, Lys, Cys, Orn, homocycstein or acetyl phenyalanine
  MISC_FEATURE (23)..(23): Xaa at position 23 is Val or Ile
  MISC_FEATURE (24)..(24): Xaa at position 24 = Ala, Gln, Glu, Lys, Cys, Orn, homocycstein or acetyl phenyalanine
  MISC_FEATURE (27)..(27): Xaa at position 27 = Met, Leu or Nle
  MISC_FEATURE (28)..(28): Xaa at position 28 = Asn, Lys or Asp
  MISC_FEATURE (29)..(29): Xaa at position 29 is Thr or Gly, Lys, Cys, Orn, homocycstein or acetyl phenyalanine
XXXGTFTSDYSKYLXXRRAXXFXXWLXXX

SEQ ID NO: 121 - protein, 38 aa, Artificial Sequence
  glucagon analogue
  MISC_FEATURE (15)..(15): Xaa at position 15 = Asp, Glu, homoglutamic acid, cysteic acid or homocysteic acid
  MISC_FEATURE (16)..(16): Xaa at position 16 = Ser, Glu, Gln, homoglutamic acid or homocysteic acid
  MISC_FEATURE (20)..(20): Xaa at position 20 = Gln or Lys
  MISC_FEATURE (24)..(24): Xaa at position 24 = Gln or Glu
  MISC_FEATURE (28)..(28): Xaa at position 28 = Asn, Lys or Asp
HSQGTFTSDYSKYLXXRRAXDFVXWLMXGGPSSGPPPS

SEQ ID NO: 122 - protein, 29 aa, Artificial Sequence
  glucagon analogue
  MISC_FEATURE (16)..(16): Xaa at position 16 = Ser, Glu, Gln, homoglutamic acid or homocysteic acid
  MISC_FEATURE (20)..(20): Xaa at position 20 = Gln or Lys
  MISC_FEATURE (21)..(21): Xaa at position 21 = Asp, Lys, Cys, Orn, homocycstein or acetyl phenyalanine
  MISC_FEATURE (24)..(24): Xaa at position 24 = Gln, Lys, Cys, Orn, homocycstein or acetyl phenyalanine
  MISC_FEATURE (27)..(27): Xaa at position 27 = Met, Leu or Nle
HSQGTFTSDYSKYLDXRRAXXFVXWLXNT

SEQ ID NO: 123 - protein, 29 aa, Artificial Sequence
  glucagon analogue
  MISC_FEATURE (15)..(15): Xaa at position 15 = Asp, Glu, homoglutamic acid, cysteic acid or homocysteic acid
  MISC_FEATURE (16)..(16): Xaa at position 16 = Ser, Glu, Gln, homoglutamic acid or homocysteic acid
  MISC_FEATURE (20)..(20): Xaa at position 20 = Gln, Lys, Arg, Orn, or citrulline
  MISC_FEATURE (21)..(21): Xaa at position 21 = Asp, Glu, homoglutamic acid, or homocysteic acid
  MISC_FEATURE (24)..(24): Xaa at position 24 = Gln or Glu
  MISC_FEATURE (28)..(28): Xaa at position 28 = Asn, Lys or an acidic amino acid
  MISC_FEATURE (29)..(29): Xaa at position 29 = Thr, Gly or an acidic amino acid
HSQGTFTSDYSKYLXXRRAXXFVXWLMXX

SEQ ID NO: 124 - protein, 29 aa, Homo sapiens
HSQGTFTSDYSKYLDERRAKDFVQWLMNT

SEQ ID NO: 125 - protein, 29 aa, Artificial Sequence
  glucagon analogue
HSQGTFTSDYSKYLDSRRAKDFVEWLMNT

SEQ ID NO: 126 - protein, 29 aa, Artificial Sequence
  glucagon analogue
HSQGTFTSDYSKYLDSRRAQDFVEWLMKT

SEQ ID NO: 127 - protein, 29 aa, Artificial Sequence
  Glucagon analogue
  MISC_FEATURE (2)..(2): Xaa is d-serine, alanine, glycine, n-methyl serine and aminoisobutyric acid
  MOD_RES (29)..(29): AMIDATION
HXQGTFTSDYSKYLDERRAQDFVQWLMNT

SEQ ID NO: 128 - protein, 29 aa, Artificial Sequence
  Glucagon analogue
  MISC_FEATURE (2)..(2): Xaa is aminoisobutyric acid
  MOD_RES (29)..(29): AMIDATION
HXQGTFTSDYSKYLDERRAQDFVQWLMNT

SEQ ID NO: 129 - protein, 39 aa, Artificial Sequence
  Glucagon analogue
  MISC_FEATURE (27)..(27): Xaa is Met, Leu or Nle
HSQGTFTSDYSKYLDERRAQDFVQWLXNTGPSSGAPPPS

SEQ ID NO: 130 - protein, 37 aa, Artificial Sequence
  Glucagon analogue
  MISC_FEATURE (27)..(27): Xaa is Met, Leu or Nle
HSQGTFTSDYSKYLDERRAQDFVQWLXNTKRNRNNIA

SEQ ID NO: 131 - protein, 33 aa, Artificial Sequence
  Glucagon analogue
  MISC_FEATURE (27)..(27): Xaa is Met, Leu or Nle
HSQGTFTSDYSKYLDERRAQDFVQWLXNTKRNR

SEQ ID NO: 132 - protein, 88 aa, Artificial Sequence
  Insulin conjugate
HAEGTFTSDVSSYLEEQAAREFIAWLVRGRGGPEHLCGAHLVDALYLVCGDRGFYFNDRGAGSSSRRGIVDECCHRSCDLRRLENYCN

SEQ ID NO: 133 - protein, 88 aa, Artificial Sequence
  Insulin conjugate
HAEGTFTSDVSSYLEEQAAREFIAWLVRGRGGPEHLCGAHLVDALYLVCGDRGFYFNDRGAGSSSRRGIVDECCHRSCDLRRLENACN

SEQ ID NO: 134 - protein, 88 aa, Artificial Sequence
  Insulin conjugate
HAEGTFTSDVSSYLEEQAAREAIAWLVRGRGGPEHLCGAHLVDALYLVCGDRGFYFNDRGAGSSSRRGIVDECCHRSCDLRRLENYCN

SEQ ID NO: 135 - protein, 86 aa, Artificial Sequence
  Insulin conjugate
HSQGTFTSDYSKYLDSRRAQDFVQWLMNTGPEHLCGAHLVDALYLVCGDRGFYFNDRGAGSSSRRGIVDECCHRSCDLRRLENYCN

SEQ ID NO: 136 - protein, 86 aa, Artificial Sequence
  Insulin conjugate
HSQGTFTSDYSKYLDSRRAQDFVQWLMNTGPEHLCGAHLVDALYLVCGDRGFYFNDRGAGSSSRRGIVDECCHRSCDLRRLENACN

SEQ ID NO: 137 - protein, 86 aa, Artificial Sequence
  Insulin conjugate
HSEGTFTSDYSKYLDSRRAQDFVQWLMNTGPEHLCGAHLVDALYLVCGDRGFYFNDRGAGSSSRRGIVDECCHRSCDLRRLENYCN

SEQ ID NO: 138 - protein, 86 aa, Artificial Sequence
  Insulin conjugate
HSQGTFTSDYSKYLDERRAQDFVQWLMNTGPEHLCGAHLVDALYLVCGDRGFYFNDRGAGSSSRRGIVDECCHRSCDLRRLENYCN

SEQ ID NO: 139 - protein, 90 aa, Artificial Sequence
  Conjugate of GLP-1 and insulin
HAEGTFTSDVSSYLEEQAAREFIAWLVRGRGFVNQHLCGSHLVEALYLVCGERGFFYTPKTGAGSSSRRGIVEQCCTSICSLYQLENYCN

SEQ ID NO: 140 - protein, 88 aa, Artificial Sequence
  Conjugate of glucagon and insulin
HSQGTFTSDYSKYLDSRRAQDFVQWLMNTFVNQHLCGSHLVEALYLVCGERGFFYTPKTGAGSSSRRGIVEQCCTSICSLYQLENYCN

SEQ ID NO: 141 - protein, 35 aa, Homo sapiens
RREAEDLQVGQVELGGGPGAGSLQPLALEGSLQKR

SEQ ID NO: 142 - protein, 23 aa, Artificial Sequence
  Analog of the insulin B chain
  MISC_FEATURE (1)..(1): Xaa at position 1 is histidine or threonine
  MISC_FEATURE (5)..(5): Xaa at position 5 is alanine, glycine or serine
  MISC_FEATURE (6)..(6): Xaa at position 6 is histidine, aspartic acid, glutamic acid, homocysteic acid or cysteic acid
  MISC_FEATURE (9)..(9): Xaa at position 9 is aspartic acid, glutamine or glutamic acid
  MISC_FEATURE (10)..(10): Xaa at position 10 is alanine or threonine
  MISC_FEATURE (17)..(17): Xaa at position 12 is glutamic acid, aspartic acid or asparagine
  MISC_FEATURE (18)..(18): Xaa at position 18 is alanine, ornithine, lysine or arginine
  MISC_FEATURE (21)..(21): Xaa at position 21 is tyrosine or 4-amino-phenylalanine
XLCGXXLVXXLYLVCGXXGFXYT

SEQ ID NO: 143 - protein, 59 aa, Artificial Sequence
  Single chain insulin analog
FVNQHLCGSHLVEALYLVCGERGFFYTPKTGAGSSSRRGIVEQCCTSICSLYQLENYCN

SEQ ID NO: 144 - protein, 57 aa, Artificial Sequence
  Single chain insulin analog
  MISC_FEATURE (4)..(4): Xaa at position 4 is histidine or threonine
  MISC_FEATURE (9)..(9): Xaa at position 9 is ihistidine, aspartic acid, glutamic acid, homocysteic acid or cysteic acid
  MISC_FEATURE (21)..(21): Xaa at position 21 is alanine ornithine or arginine
  MISC_FEATURE (27)..(27): Xaa at position 21 is lysine or aspartic acid
  MISC_FEATURE (28)..(28): Xaa at position 21 is proline, ornithine or arginine
  MISC_FEATURE (44)..(44): Xaa at position 21 is phenylalanine or histidine
GPEXLCGAXLVDALYLVCGDXGFYFNXXGAGSSSRRGIVDECCXRSCDLRRLENYCN

SEQ ID NO: 145 - protein, 57 aa, Artificial Sequence
  Single chain insulin analog
GPEHLCGAHLVDALYLVCGDRGFYFNDRGAGSSSRRGIVDECCHRSCDLRRLENYCN

SEQ ID NO: 146 - protein, 29 aa, Artificial Sequence
  glucagon analog
  MISC_FEATURE: c-term amidation
  MISC_FEATURE (12)..(16): Lactam ring between side chains at positions 12 and 16
HSEGTFTSDYSKYLDERAAQDFVQWLMNT

SEQ ID NO: 147 - protein, 29 aa, Artificial Sequence
  glucagon analog
  MISC_FEATURE: c-term amidation
  MISC_FEATURE (12)..(16): Lactam ring between side chains at positions 12 and 16
HSEGTFTSDYSKYLDERAAKDFVQWLMNT

SEQ ID NO: 148 - protein, 29 aa, Artificial Sequence
  glucagon analog
  MISC_FEATURE: c-term amidation
  MISC_FEATURE (16)..(20): Lactam ring between side chains at positions 16 and 20
HSEGTFTSDYSKYLDKRAAEDFVQWLMNT

SEQ ID NO: 149 - protein, 29 aa, Artificial Sequence
  glucagon analog
  MISC_FEATURE: c-term amidation
HSEGTFTSDYSKYLDEQAAKEFIAWLMNT

SEQ ID NO: 150 - protein, 29 aa, Artificial Sequence
  glucagon analog
  MISC_FEATURE: c-term amidation
  MISC_FEATURE (12)..(16): Lactam ring between side chains at positions 12 and 16
HSEGTFTSDYSKYLDEQAAKEFIAWLMNT

SEQ ID NO: 151 - protein, 29 aa, Artificial Sequence
  glucagon analog
  MISC_FEATURE: c-term amidation
  MISC_FEATURE (16)..(20): Lactam ring between side chains at positions 16 and 20
HSEGTFTSDYSKYLDEQAAKEFIAWLMNT

SEQ ID NO: 152 - protein, 29 aa, Artificial Sequence
  glucagon analog
  MISC_FEATURE: c-term amidation
HSEGTFTSDYSKYLDEQAAKEFIAWLVKG

SEQ ID NO: 153 - protein, 29 aa, Artificial Sequence
  glucagon analog
  MISC_FEATURE: c-term amidation
  MISC_FEATURE (12)..(16): Lactam ring between side chains at positions 12 and 16
HSEGTFTSDYSKYLDEQAAKEFIAWLVKG

SEQ ID NO: 154 - protein, 29 aa, Artificial Sequence
  glucagon analog
  MISC_FEATURE: c-term amidation
  MISC_FEATURE (16)..(20): Lactam ring between side chains at positions 16 and 20
HSEGTFTSDYSKYLDEQAAKEFIAWLVKG

SEQ ID NO: 155 - protein, 29 aa, Artificial Sequence
  glucagon analog
  MISC_FEATURE: c-term amidation
  MOD_RES (1)..(1): (Des-amino)His
XSEGTFTSDYSKYLDERRAQDFVQWLMNT

SEQ ID NO: 156 - protein, 29 aa, Artificial Sequence
  glucagon analog
  MISC_FEATURE: c-term amidation
  MOD_RES (1)..(1): (Des-amino)His
XSEGTFTSDYSKYLDERRAKDFVQWLMNT

SEQ ID NO: 157 - protein, 29 aa, Artificial Sequence
  glucagon analog
  MISC_FEATURE: c-term amidation
  MOD_RES (1)..(1): (Des-amino)His
  MISC_FEATURE (16)..(20): Lactam ring between side chains at positions 16 and 20
XSEGTFTSDYSKYLDERRAKDFVQWLMNT

SEQ ID NO: 158 - protein, 29 aa, Artificial Sequence
  glucagon analog
  MISC_FEATURE: c-term amidation
  MOD_RES (1)..(1): (Des-amino)His
  MISC_FEATURE (12)..(16): Lactam ring between side chains at positions 12 and 16
XSEGTFTSDYSKYLDERRAQDFVQWLMNT

SEQ ID NO: 159 - protein, 29 aa, Artificial Sequence
  glucagon analog
  MISC_FEATURE: c-term amidation
  MOD_RES (1)..(1): (Des-amino)His
  MISC_FEATURE (12)..(16): Lactam ring between side chains at positions 12 and 16
XSEGTFTSDYSKYLDERRAKDFVQWLMNT

SEQ ID NO: 160 - protein, 29 aa, Artificial Sequence
  glucagon analog
  MISC_FEATURE: c-term amidation
  MOD_RES (1)..(1): (Des-amino)His
  MISC_FEATURE (16)..(20): Lactam ring between side chains at positions 16 and 20
XSEGTFTSDYSKYLDKRRAEDFVQWLMNT

SEQ ID NO: 161 - protein, 29 aa, Artificial Sequence
  glucagon analog
  MISC_FEATURE: c-term amidation
  MOD_RES (1)..(1): (Des-amino)His
XSEGTFTSDYSKYLDERAAKDFVQWLMNT

SEQ ID NO: 162 - protein, 29 aa, Artificial Sequence
  glucagon analog
  MISC_FEATURE: c-term amidation
  MOD_RES (1)..(1): (Des-amino)His
  MISC_FEATURE (16)..(20): Lactam ring between side chains at positions 16 and 20
XSEGTFTSDYSKYLDERAAKDFVQWLMNT

SEQ ID NO: 163 - protein, 29 aa, Artificial Sequence
  glucagon analog
  MISC_FEATURE: c-term amidation
  MOD_RES (1)..(1): (Des-amino)His
  MISC_FEATURE (12)..(16): Lactam ring between side chains at positions 12 and 16
XSEGTFTSDYSKYLDERAAQDFVQWLMNT

SEQ ID NO: 164 - protein, 29 aa, Artificial Sequence
  glucagon analog
  MISC_FEATURE: c-term amidation
  MOD_RES (1)..(1): (Des-amino)His
  MISC_FEATURE (12)..(16): Lactam ring between side chains at positions 12 and 16
XSEGTFTSDYSKYLDERAAKDFVQWLMNT

SEQ ID NO: 165 - protein, 29 aa, Artificial Sequence
  glucagon analog
  MISC_FEATURE: c-term amidation
  MOD_RES (1)..(1): (Des-amino)His
  MISC_FEATURE (16)..(20): Lactam ring between side chains at positions 16 and 20
XSEGTFTSDYSKYLDKRAAEDFVQWLMNT

SEQ ID NO: 166 - protein, 29 aa, Artificial Sequence
  glucagon analog
  MISC_FEATURE: c-term amidation
  MOD_RES (1)..(1): (Des-amino)His
XSEGTFTSDYSKYLDEQAAKEFIAWLMNT

SEQ ID NO: 167 - protein, 29 aa, Artificial Sequence
  glucagon analog
  MISC_FEATURE: c-term amidation
  MOD_RES (1)..(1): (Des-amino)His
  MISC_FEATURE (12)..(16): Lactam ring between side chains at positions 12 and 16
XSEGTFTSDYSKYLDEQAAKEFIAWLMNT

SEQ ID NO: 168 - protein, 29 aa, Artificial Sequence
  glucagon analog
  MISC_FEATURE: c-term amidation
  MOD_RES (1)..(1): (Des-amino)His
  MISC_FEATURE (16)..(20): Lactam ring between side chains at positions 16 and 20
XSEGTFTSDYSKYLDEQAAKEFIAWLMNT

SEQ ID NO: 169 - protein, 29 aa, Artificial Sequence
  glucagon analog
  MISC_FEATURE: c-term amidation
  MOD_RES (1)..(1): (Des-amino)His
XSEGTFTSDYSKYLDEQAAKEFIAWLVKG

SEQ ID NO: 170 - protein, 29 aa, Artificial Sequence
  glucagon analog
  MISC_FEATURE: c-term amidation
  MOD_RES (1)..(1): (Des-amino)His
  MISC_FEATURE (12)..(16): Lactam ring between side chains at positions 12 and 16
XSEGTFTSDYSKYLDEQAAKEFIAWLVKG

SEQ ID NO: 171 - protein, 29 aa, Artificial Sequence
  glucagon analog
  MISC_FEATURE: c-term amidation
  MOD_RES (1)..(1): (Des-amino)His
  MISC_FEATURE (16)..(20): Lactam ring between side chains at positions 16 and 20
XSEGTFTSDYSKYLDEQAAKEFIAWLVKG

SEQ ID NO: 172 - protein, 29 aa, Artificial Sequence
  glucagon analog
  MISC_FEATURE: c-term amidation
  MOD_RES (2)..(2): Aminoisobutyric acid
HXEGTFTSDYSKYLDERRAQDFVQWLMNT

SEQ ID NO: 173 - protein, 29 aa, Artificial Sequence
  glucagon analog
  MISC_FEATURE: c-term amidation
  MOD_RES (2)..(2): Aminoisobutyric acid
HXEGTFTSDYSKYLDERRAKDFVQWLMNT

SEQ ID NO: 174 - protein, 29 aa, Artificial Sequence
  glucagon analog
  MISC_FEATURE: c-term amidation
  MOD_RES (2)..(2): Aminoisobutyric acid
  MISC_FEATURE (16)..(20): Lactam ring between side chains at positions 16 and 20
HXEGTFTSDYSKYLDERRAKDFVQWLMNT

SEQ ID NO: 175 - protein, 29 aa, Artificial Sequence
  glucagon analog
  MISC_FEATURE: c-term amidation
  MOD_RES (2)..(2): Aminoisobutyric acid
  MISC_FEATURE (12)..(16): Lactam ring between side chains at positions 12 and 16
HXEGTFTSDYSKYLDERRAQDFVQWLMNT

SEQ ID NO: 176 - protein, 29 aa, Artificial Sequence
  glucagon analog
  MISC_FEATURE: c-term amidation
  MOD_RES (2)..(2): Aminoisobutyric acid
  MISC_FEATURE (12)..(16): Lactam ring between side chains at positions 12 and 16
HXEGTFTSDYSKYLDERRAKDFVQWLMNT

SEQ ID NO: 177 - protein, 29 aa, Artificial Sequence
  glucagon analog
  MISC_FEATURE: c-term amidation
  MOD_RES (2)..(2): Aminoisobutyric acid
  MISC_FEATURE (16)..(20): Lactam ring between side chains at positions 16 and 20
HXEGTFTSDYSKYLDKRRAEDFVQWLMNT

SEQ ID NO: 178 - protein, 29 aa, Artificial Sequence
  glucagon analog
  MISC_FEATURE: c-term amidation
  MOD_RES (2)..(2): Aminoisobutyric acid
HXEGTFTSDYSKYLDERAAKDFVQWLMNT

SEQ ID NO: 179 - protein, 29 aa, Artificial Sequence
  glucagon analog
  MISC_FEATURE: c-term amidation
  MOD_RES (2)..(2): Aminoisobutyric acid
  MISC_FEATURE (16)..(20): Lactam ring between side chains at positions 16 and 20
HXEGTFTSDYSKYLDERAAKDFVQWLMNT

SEQ ID NO: 180 - protein, 29 aa, Artificial Sequence
  glucagon analog
  MISC_FEATURE: c-term amidation
  MOD_RES (2)..(2): Aminoisobutyric acid
  MISC_FEATURE (12)..(16): Lactam ring between side chains at positions 12 and 16
HXEGTFTSDYSKYLDERAAQDFVQWLMNT

SEQ ID NO: 181 - protein, 29 aa, Artificial Sequence
  glucagon analog
  MISC_FEATURE: c-term amidation
  MOD_RES (2)..(2): Aminoisobutyric acid
  MISC_FEATURE (12)..(16): Lactam ring between side chains at positions 12 and 16
HXEGTFTSDYSKYLDERAAKDFVQWLMNT

SEQ ID NO: 182 - protein, 29 aa, Artificial Sequence
  glucagon analog
  MISC_FEATURE: c-term amidation
  MOD_RES (2)..(2): Aminoisobutyric acid
  MISC_FEATURE (16)..(20): Lactam ring between side chains at positions 16 and 20
HXEGTFTSDYSKYLDKRAAEDFVQWLMNT

SEQ ID NO: 183 - protein, 29 aa, Artificial Sequence
  glucagon analog
  MISC_FEATURE: c-term amidation
  MOD_RES (2)..(2): Aminoisobutyric acid
HXEGTFTSDYSKYLDEQAAKEFIAWLMNT

SEQ ID NO: 184 - protein, 29 aa, Artificial Sequence
  glucagon analog
  MISC_FEATURE: c-term amidation
  MOD_RES (2)..(2): Aminoisobutyric acid
  MISC_FEATURE (12)..(16): Lactam ring between side chains at positions 12 and 16
HXEGTFTSDYSKYLDEQAAKEFIAWLMNT

SEQ ID NO: 185 - protein, 29 aa, Artificial Sequence
  glucagon analog
  MISC_FEATURE: c-term amidation
  MOD_RES (2)..(2): Aminoisobutyric acid
  MISC_FEATURE (16)..(20): Lactam ring between side chains at positions 16 and 20
HXEGTFTSDYSKYLDEQAAKEFIAWLMNT

SEQ ID NO: 186 - protein, 29 aa, Artificial Sequence
  glucagon analog
  MISC_FEATURE: c-term amidation
  MOD_RES (2)..(2): Aminoisobutyric acid
HXEGTFTSDYSKYLDEQAAKEFIAWLVKG

SEQ ID NO: 187 - protein, 29 aa, Artificial Sequence
  glucagon analog
  MISC_FEATURE: c-term amidation
  MOD_RES (2)..(2): Aminoisobutyric acid
  MISC_FEATURE (12)..(16): Lactam ring between side chains at positions 12 and 16
HXEGTFTSDYSKYLDEQAAKEFIAWLVKG

SEQ ID NO: 188 - protein, 29 aa, Artificial Sequence
  glucagon analog
  MISC_FEATURE: c-term amidation
  MOD_RES (2)..(2): Aminoisobutyric acid
  MISC_FEATURE (16)..(20): Lactam ring between side chains at positions 16 and 20
HXEGTFTSDYSKYLDEQAAKEFIAWLVKG

SEQ ID NO: 189 - protein, 29 aa, Artificial Sequence
  glucagon analog
  MISC_FEATURE: c-term amidation
  MOD_RES (2)..(2): D-Ala
HXEGTFTSDYSKYLDERRAQDFVQWLMNT

SEQ ID NO: 190 - protein, 29 aa, Artificial Sequence
  glucagon analog
  MISC_FEATURE: c-term amidation
  MOD_RES (2)..(2): D-Ala
HXEGTFTSDYSKYLDERRAKDFVQWLMNT

SEQ ID NO: 191 - protein, 29 aa, Artificial Sequence
  glucagon analog
  MISC_FEATURE: c-term amidation
  MOD_RES (2)..(2): D-Ala
  MISC_FEATURE (16)..(20): Lactam ring between side chains at positions 16 and 20
HXEGTFTSDYSKYLDERRAKDFVQWLMNT

SEQ ID NO: 192 - protein, 29 aa, Artificial Sequence
  glucagon analog
  MISC_FEATURE: c-term amidation
  MOD_RES (2)..(2): D-Ala
  MISC_FEATURE (12)..(16): Lactam ring between side chains at positions 12 and 16
HXEGTFTSDYSKYLDERRAQDFVQWLMNT

SEQ ID NO: 193 - protein, 29 aa, Artificial Sequence
  glucagon analog
  MISC_FEATURE: c-term amidation
  MOD_RES (2)..(2): D-Ala
  MISC_FEATURE (12)..(16): Lactam ring between side chains at positions 12 and 16
HXEGTFTSDYSKYLDERRAKDFVQWLMNT

SEQ ID NO: 194 - protein, 29 aa, Artificial Sequence
  glucagon analog
  MISC_FEATURE: c-term amidation
  MOD_RES (2)..(2): D-Ala
  MISC_FEATURE (16)..(20): Lactam ring between side chains at positions 16 and 20
HXEGTFTSDYSKYLDKRRAEDFVQWLMNT

SEQ ID NO: 195 - protein, 29 aa, Artificial Sequence
  glucagon analog
  MISC_FEATURE: c-term amidation
  MOD_RES (2)..(2): D-Ala
  MISC_FEATURE (16)..(20): Lactam ring between side chains at positions 16 and 20
HXEGTFTSDYSKYLDERAAKDFVQWLMNT

SEQ ID NO: 196 - protein, 29 aa, Artificial Sequence
  glucagon analog
  MISC_FEATURE: c-term amidation
  MOD_RES (2)..(2): D-Ala
  MISC_FEATURE (16)..(20): Lactam ring between side chains at positions 16 and 20
HXEGTFTSDYSKYLDERAAKDFVQWLMNT

SEQ ID NO: 197 - protein, 29 aa, Artificial Sequence
  glucagon analog
  MISC_FEATURE: c-term amidation
  MOD_RES (2)..(2): D-Ala
  MISC_FEATURE (12)..(16): Lactam ring between side chains at positions 12 and 16
HXEGTFTSDYSKYLDERAAQDFVQWLMNT

SEQ ID NO: 198 - protein, 29 aa, Artificial Sequence
  glucagon analog
  MISC_FEATURE: c-term amidation
  MOD_RES (2)..(2): D-Ala
  MISC_FEATURE (12)..(16): Lactam ring between side chains at positions 12 and 16
HXEGTFTSDYSKYLDERAAKDFVQWLMNT

SEQ ID NO: 199 - protein, 29 aa, Artificial Sequence
  glucagon analog
  MISC_FEATURE: c-term amidation
  MOD_RES (2)..(2): D-Ala
  MISC_FEATURE (16)..(20): Lactam ring between side chains at positions 16 and 20
HXEGTFTSDYSKYLDKRAAEDFVQWLMNT

SEQ ID NO: 200 - protein, 29 aa, Artificial Sequence
  glucagon analog
  MISC_FEATURE: c-term amidation
  MOD_RES (2)..(2): D-Ala
HXEGTFTSDYSKYLDEQAAKEFIAWLMNT

SEQ ID NO: 201 - protein, 29 aa, Artificial Sequence
  glucagon analog
  MISC_FEATURE: c-term amidation
  MOD_RES (2)..(2): D-Ala
  MISC_FEATURE (12)..(16): Lactam ring between side chains at positions 12 and 16
HXEGTFTSDYSKYLDEQAAKEFIAWLMNT

SEQ ID NO: 202 - protein, 29 aa, Artificial Sequence
  glucagon analog
  MISC_FEATURE: c-term amidation
  MOD_RES (2)..(2): D-Ala
  MISC_FEATURE (16)..(20): Lactam ring between side chains at positions 16 and 20
HXEGTFTSDYSKYLDEQAAKEFIAWLMNT

SEQ ID NO: 203 - protein, 29 aa, Artificial Sequence
  glucagon analog
  MISC_FEATURE: c-term amidation
  MOD_RES (2)..(2): D-Ala
HXEGTFTSDYSKYLDEQAAKEFIAWLVKG

SEQ ID NO: 204 - protein, 29 aa, Artificial Sequence
  glucagon analog
  MISC_FEATURE: c-term amidation
  MOD_RES (2)..(2): D-Ala
  MISC_FEATURE (12)..(16): Lactam ring between side chains at positions 12 and 16
HXEGTFTSDYSKYLDEQAAKEFIAWLVKG

SEQ ID NO: 205 - protein, 29 aa, Artificial Sequence
  glucagon analog
  MISC_FEATURE: Lactam ring between side chains at positions 16 and 20
  MOD_RES (2)..(2): D-Ala
  MISC_FEATURE (16)..(20): c-term amidation
HXEGTFTSDYSKYLDEQAAKEFIAWLVKG

SEQ ID NO: 206 - protein, 29 aa, Artificial Sequence
  glucagon analog
  MISC_FEATURE: c-term amidation
  MOD_RES (24)..(24): Cys-PEG
HSQGTFTSDYSKYLDERRAQDFVCWLMNT

SEQ ID NO: 207 - protein, 29 aa, Artificial Sequence
  glucagon analog
  MISC_FEATURE: c-term amidation
  MOD_RES (24)..(24): Cys-PEG
HSQGTFTSDYSKYLDERRAKDFVCWLMNT

SEQ ID NO: 208 - protein, 29 aa, Artificial Sequence
  glucagon analog
  MISC_FEATURE: c-term amidation
  MISC_FEATURE (16)..(20): Lactam ring between side chains at positions 16 and 20
  MOD_RES (24)..(24): Cys-PEG
HSQGTFTSDYSKYLDERRAKDFVCWLMNT

SEQ ID NO: 209 - protein, 29 aa, Artificial Sequence
  glucagon analog
  MISC_FEATURE: c-term amidation
  MISC_FEATURE (12)..(16): Lactam ring between side chains at positions 12 and 16
  MOD_RES (24)..(24): Cys-PEG
HSQGTFTSDYSKYLDERRAQDFVCWLMNT

SEQ ID NO: 210 - protein, 29 aa, Artificial Sequence
  glucagon analog
  MISC_FEATURE: c-term amidation
  MISC_FEATURE (12)..(16): Lactam ring between side chains at positions 12 and 16
  MOD_RES (24)..(24): Cys-PEG
HSQGTFTSDYSKYLDERRAKDFVCWLMNT

SEQ ID NO: 211 - protein, 29 aa, Artificial Sequence
  glucagon analog
  MISC_FEATURE: c-term amidation
  MISC_FEATURE (16)..(20): Lactam ring between side chains at positions 16 and 20
  MOD_RES (24)..(24): Cys-PEG
HSQGTFTSDYSKYLDKRRAEDFVCWLMNT

SEQ ID NO: 212 - protein, 29 aa, Artificial Sequence
  glucagon analog
  MISC_FEATURE: c-term amidation
  MISC_FEATURE (16)..(20): Lactam ring between side chains at positions 16 and 20
  MOD_RES (24)..(24): Cys-PEG
HSQGTFTSDYSKYLDERAAKDFVCWLMNT

SEQ ID NO: 213 - protein, 29 aa, Artificial Sequence
  glucagon analog
  MISC_FEATURE: c-term amidation
  MISC_FEATURE (16)..(20): Lactam ring between side chains at positions 16 and 20
  MOD_RES (24)..(24): Cys-PEG
HSQGTFTSDYSKYLDERAAKDFVCWLMNT

SEQ ID NO: 214 - protein, 29 aa, Artificial Sequence
  glucagon analog
  MISC_FEATURE: c-term amidation
  MISC_FEATURE (12)..(16): Lactam ring between side chains at positions 12 and 16
  MOD_RES (24)..(24): Cys-PEG
HSQGTFTSDYSKYLDERAAQDFVCWLMNT

SEQ ID NO: 215 - protein, 29 aa, Artificial Sequence
  glucagon analog
  MISC_FEATURE: c-term amidation
  MISC_FEATURE (12)..(16): Lactam ring between side chains at positions 12 and 16
  MOD_RES (24)..(24): Cys-PEG
HSQGTFTSDYSKYLDERAAKDFVCWLMNT

SEQ ID NO: 216 - protein, 29 aa, Artificial Sequence
  glucagon analog
  MISC_FEATURE: c-term amidation
  MISC_FEATURE (16)..(20): Lactam ring between side chains at positions 16 and 20
  MOD_RES (24)..(24): Cys-PEG
HSQGTFTSDYSKYLDKRAAEDFVCWLMNT

SEQ ID NO: 217 - protein, 29 aa, Artificial Sequence
  glucagon analog
  MISC_FEATURE: c-term amidation
  MOD_RES (24)..(24): Cys-PEG
HSQGTFTSDYSKYLDEQAAKEFICWLMNT

SEQ ID NO: 218 - protein, 29 aa, Artificial Sequence
  glucagon analog
  MISC_FEATURE: c-term amidation
  MISC_FEATURE (12)..(16): Lactam ring between side chains at positions 12 and 16
  MOD_RES (24)..(24): Cys-PEG
HSQGTFTSDYSKYLDEQAAKEFICWLMNT

SEQ ID NO: 219 - protein, 29 aa, Artificial Sequence
  glucagon analog
  MISC_FEATURE: c-term amidation
  MISC_FEATURE (16)..(20): Lactam ring between side chains at positions 16 and 20
  MOD_RES (24)..(24): Cys-PEG
HSQGTFTSDYSKYLDEQAAKEFICWLMNT

SEQ ID NO: 220 - protein, 29 aa, Artificial Sequence
  glucagon analog
  MISC_FEATURE: c-term amidation
  MOD_RES (24)..(24): Cys-PEG
HSQGTFTSDYSKYLDEQAAKEFICWLVKG

SEQ ID NO: 221 - protein, 29 aa, Artificial Sequence
  glucagon analog
  MISC_FEATURE: c-term amidation
  MISC_FEATURE (12)..(16): Lactam ring between side chains at positions 12 and 16
  MOD_RES (24)..(24): Cys-PEG
HSQGTFTSDYSKYLDEQAAKEFICWLVKG

SEQ ID NO: 222 - protein, 29 aa, Artificial Sequence
  glucagon analog
  MISC_FEATURE: c-term amidation
  MISC_FEATURE (16)..(20): Lactam ring between side chains at positions 16 and 20
  MOD_RES (24)..(24): Cys-PEG
HSQGTFTSDYSKYLDEQAAKEFICWLVKG

SEQ ID NO: 223 - protein, 29 aa, Artificial Sequence
  glucagon analog
  MISC_FEATURE: c-term amidation
  MOD_RES (1)..(1): (Des-amino)His
  MOD_RES (24)..(24): Cys-PEG
XSQGTFTSDYSKYLDERRAQDFVCWLMNT

SEQ ID NO: 224 - protein, 29 aa, Artificial Sequence
  glucagon analog
  MISC_FEATURE: c-term amidation
  MOD_RES (1)..(1): (Des-amino)His
  MOD_RES (24)..(24): Cys-PEG
XSQGTFTSDYSKYLDERRAKDFVCWLMNT

SEQ ID NO: 225 - protein, 29 aa, Artificial Sequence
  glucagon analog
  MISC_FEATURE: c-term amidation
  MOD_RES (1)..(1): (Des-amino)His
  MISC_FEATURE (16)..(20): Lactam ring between side chains at positions 16 and 20
  MOD_RES (24)..(24): Cys-PEG
XSQGTFTSDYSKYLDERRAKDFVCWLMNT

SEQ ID NO: 226 - protein, 29 aa, Artificial Sequence
  glucagon analog
  MISC_FEATURE: c-term amidation
  MOD_RES (1)..(1): (Des-amino)His
  MISC_FEATURE (12)..(16): Lactam ring between side chains at positions 12 and 16
  MOD_RES (24)..(24): Cys-PEG
XSQGTFTSDYSKYLDERRAQDFVCWLMNT

SEQ ID NO: 227 - protein, 29 aa, Artificial Sequence
  glucagon analog
  MISC_FEATURE: c-term amidation
  MOD_RES (1)..(1): (Des-amino)His
  MISC_FEATURE (12)..(16): Lactam ring between side chains at positions 12 and 16
  MOD_RES (24)..(24): Cys-PEG
XSQGTFTSDYSKYLDERRAKDFVCWLMNT

SEQ ID NO: 228 - protein, 29 aa, Artificial Sequence
  glucagon analog
  MISC_FEATURE: c-term amidation
  MOD_RES (1)..(1): (Des-amino)His
  MISC_FEATURE (16)..(20): Lactam ring between side chains at positions 16 and 20
  MOD_RES (24)..(24): Cys-PEG
XSQGTFTSDYSKYLDKRRAEDFVCWLMNT

SEQ ID NO: 229 - protein, 29 aa, Artificial Sequence
  glucagon analog
  MISC_FEATURE: c-term amidation
  MOD_RES (1)..(1): (Des-amino)His
  MOD_RES (24)..(24): Cys-PEG
XSQGTFTSDYSKYLDERAAKDFVCWLMNT

SEQ ID NO: 230 - protein, 29 aa, Artificial Sequence
  glucagon analog
  MISC_FEATURE: c-term amidation
  MOD_RES (1)..(1): (Des-amino)His
  MISC_FEATURE (16)..(20): Lactam ring between side chains at positions 16 and 20
  MOD_RES (24)..(24): Cys-PEG
XSQGTFTSDYSKYLDERAAKDFVCWLMNT

SEQ ID NO: 231 - protein, 29 aa, Artificial Sequence
  glucagon analog
  MISC_FEATURE: c-term amidation; lactam ring between side chains at positions 12 and 16
  MOD_RES (1)..(1): (Des-amino)His
  MOD_RES (24)..(24): Cys-PEG
XSQGTFTSDYSKYLDERAAQDFVCWLMNT

SEQ ID NO: 232 - protein, 29 aa, Artificial Sequence
  glucagon analog
  MISC_FEATURE: c-term amidation
  MOD_RES (1)..(1): (Des-amino)His
  MISC_FEATURE (12)..(16): Lactam ring between side chains at positions 12 and 16
  MOD_RES (24)..(24): Cys-PEG
XSQGTFTSDYSKYLDERAAKDFVCWLMNT

SEQ ID NO: 233 - protein, 29 aa, Artificial Sequence
  glucagon analog
  MISC_FEATURE: c-term amidation
  MOD_RES (1)..(1): (Des-amino)His
  MISC_FEATURE (16)..(20): Lactam ring between side chains at positions 16 and 20
  MOD_RES (24)..(24): Cys-PEG
XSQGTFTSDYSKYLDKRAAEDFVCWLMNT

SEQ ID NO: 234 - protein, 29 aa, Artificial Sequence
  glucagon analog
  MISC_FEATURE: c-term amidation
  MOD_RES (1)..(1): (Des-amino)His
  MOD_RES (24)..(24): Cys-PEG
XSQGTFTSDYSKYLDEQAAKEFICWLMNT

SEQ ID NO: 235 - protein, 29 aa, Artificial Sequence
  glucagon analog
  MISC_FEATURE: c-term amidation
  MOD_RES (1)..(1): (Des-amino)His
  MISC_FEATURE (12)..(16): Lactam ring between side chains at positions 12 and 16
  MOD_RES (24)..(24): Cys-PEG
XSQGTFTSDYSKYLDEQAAKEFICWLMNT

SEQ ID NO: 236 - protein, 29 aa, Artificial Sequence
  glucagon analog
  MISC_FEATURE: c-term amidation
  MOD_RES (1)..(1): (Des-amino)His
  MISC_FEATURE (16)..(20): Lactam ring between side chains at positions 16 and 20
  MOD_RES (24)..(24): Cys-PEG
XSQGTFTSDYSKYLDEQAAKEFICWLMNT

SEQ ID NO: 237 - protein, 29 aa, Artificial Sequence
  glucagon analog
  MISC_FEATURE: c-term amidation
  MOD_RES (1)..(1): (Des-amino)His
  MOD_RES (24)..(24): Cys-PEG
XSQGTFTSDYSKYLDEQAAKEFICWLVKG

SEQ ID NO: 238 - protein, 29 aa, Artificial Sequence
  glucagon analog
  MISC_FEATURE: c-term amidation
  MOD_RES (1)..(1): (Des-amino)His
  MISC_FEATURE (12)..(16): Lactam ring between side chains at positions 12 and 16
  MOD_RES (24)..(24): Cys-PEG
XSQGTFTSDYSKYLDEQAAKEFICWLVKG

SEQ ID NO: 239 - protein, 29 aa, Artificial Sequence
  glucagon analog
  MISC_FEATURE: c-term amidation
  MOD_RES (1)..(1): (Des-amino)His
  MISC_FEATURE (16)..(20): Lactam ring between side chains at positions 16 and 20
  MOD_RES (24)..(24): Cys-PEG
XSQGTFTSDYSKYLDEQAAKEFICWLVKG

SEQ ID NO: 240 - protein, 29 aa, Artificial Sequence
  Synthetic peptide
  MISC_FEATURE: c-term amidation
  MOD_RES (2)..(2): Aminoisobutyric acid
  MOD_RES (24)..(24): Cys-PEG
HXQGTFTSDYSKYLDERRAQDFVCWLMNT

SEQ ID NO: 241 - protein, 29 aa, Artificial Sequence
  Synthetic peptide
  MISC_FEATURE: c-term amidation
  MOD_RES (2)..(2): Aminoisobutyric acid
  MOD_RES (24)..(24): Cys-PEG
HXQGTFTSDYSKYLDERRAKDFVCWLMNT

SEQ ID NO: 242 - protein, 29 aa, Artificial Sequence
  Synthetic peptide
  MISC_FEATURE: c-term amidation
  MOD_RES (2)..(2): Aminoisobutyric acid
  MISC_FEATURE (16)..(20): Lactam ring between side chains at positions 16 and 20
  MOD_RES (24)..(24): Cys-PEG
HXQGTFTSDYSKYLDERRAKDFVCWLMNT

SEQ ID NO: 243 - protein, 29 aa, Artificial Sequence
  Synthetic peptide
  MISC_FEATURE: c-term amidation
  MOD_RES (2)..(2): Aminoisobutyric acid
  MISC_FEATURE (12)..(16): Lactam ring between side chains at positions 12 and 16
  MOD_RES (24)..(24): Cys-PEG
HXQGTFTSDYSKYLDERRAQDFVCWLMNT

SEQ ID NO: 244 - protein, 29 aa, Artificial Sequence
  Synthetic peptide
  MISC_FEATURE: c-term amidation
  MOD_RES (2)..(2): Aminoisobutyric acid
  MISC_FEATURE (12)..(16): Lactam ring between side chains at positions 12 and 16
  MOD_RES (24)..(24): Cys-PEG
HXQGTFTSDYSKYLDERRAKDFVCWLMNT

SEQ ID NO: 245 - protein, 29 aa, Artificial Sequence
  Synthetic peptide
  MISC_FEATURE: c-term amidation
  MOD_RES (2)..(2): Aminoisobutyric acid
  MISC_FEATURE (16)..(20): Lactam ring side chains at positions 16 and 20
  MOD_RES (24)..(24): Cys-PEG
HXQGTFTSDYSKYLDKRRAEDFVCWLMNT

SEQ ID NO: 246 - protein, 29 aa, Artificial Sequence
  Synthetic peptide
  MISC_FEATURE: c-term amidation
  MOD_RES (2)..(2): Aminoisobutyric acid
  MOD_RES (24)..(24): Cys-PEG
HXQGTFTSDYSKYLDERAAKDFVCWLMNT

SEQ ID NO: 247 - protein, 29 aa, Artificial Sequence
  Synthetic peptide
  MISC_FEATURE: c-term amidation
  MOD_RES (2)..(2): Aminoisobutyric acid
  MISC_FEATURE (16)..(20): Lactam ring between side chains at positions 16 and 20
  MOD_RES (24)..(24): Cys-PEG
HXQGTFTSDYSKYLDERAAKDFVCWLMNT

SEQ ID NO: 248 - protein, 29 aa, Artificial Sequence
  Synthetic peptide
  MISC_FEATURE: c-term amidation
  MOD_RES (2)..(2): Aminoisobutyric acid
  MISC_FEATURE (12)..(16): Lactam ring between side chains at positions 12 and 16
  MOD_RES (24)..(24): Cys-PEG
HXQGTFTSDYSKYLDERAAQDFVCWLMNT

SEQ ID NO: 249 - protein, 29 aa, Artificial Sequence
  Synthetic peptide
  MISC_FEATURE: c-term amidation
  MOD_RES (2)..(2): Aminoisobutyric acid
  MISC_FEATURE (12)..(16): Lactam ring between side chains at positions 12 and 16
  MOD_RES (24)..(24): Cys-PEG
HXQGTFTSDYSKYLDERAAKDFVCWLMNT

SEQ ID NO: 250 - protein, 29 aa, Artificial Sequence
  Synthetic peptide
  MISC_FEATURE: c-term amidation
  MOD_RES (2)..(2): Aminoisobutyric acid
  MISC_FEATURE (12)..(16): Lactam ring between side chains at positions 12 and 16
  MOD_RES (24)..(24): Cys-PEG
HXQGTFTSDYSKYLDKRAAEDFVCWLMNT

SEQ ID NO: 251 - protein, 29 aa, Artificial Sequence
  Synthetic peptide
  MISC_FEATURE: c-term amidation
  MOD_RES (2)..(2): Aminoisobutyric acid
  MOD_RES (24)..(24): Cys-PEG
HXQGTFTSDYSKYLDEQAAKEFICWLMNT

SEQ ID NO: 252 - protein, 29 aa, Artificial Sequence
  Synthetic peptide
  misc_feature (2)..(2): Xaa can be any naturally occurring amino acid
HXQGTFTSDYSKYLDEQAAKEFICWLMNT

SEQ ID NO: 253 - protein, 29 aa, Artificial Sequence
  Synthetic peptide
  MISC_FEATURE: c-term amidation
  MOD_RES (2)..(2): Aminoisobutyric acid
  MISC_FEATURE (16)..(20): Lactam ring between side chains at positions 16 and 20
  MOD_RES (24)..(24): Cys-PEG
HXQGTFTSDYSKYLDEQAAKEFICWLMNT

SEQ ID NO: 254 - protein, 29 aa, Artificial Sequence
  Synthetic peptide
  MISC_FEATURE: c-term amidation
  MOD_RES (2)..(2): Aminoisobutyric acid
  MOD_RES (24)..(24): Cys-PEG
HXQGTFTSDYSKYLDEQAAKEFICWLVKG

SEQ ID NO: 255 - protein, 29 aa, Artificial Sequence
  Synthetic peptide
  MISC_FEATURE: c-term amidation
  MOD_RES (2)..(2): Aminoisobutyric acid
  MISC_FEATURE (12)..(16): Lactam ring between side chains at positions 12 and 16
  MOD_RES (24)..(24): Cys-PEG
HXQGTFTSDYSKYLDEQAAKEFICWLVKG

SEQ ID NO: 256 - protein, 29 aa, Artificial Sequence
  Synthetic peptide
  MISC_FEATURE: c-term amidation
  MOD_RES (2)..(2): Aminoisobutyric acid
  MISC_FEATURE (16)..(20): Lactam ring between side chains at positions 16 and 20
  MOD_RES (24)..(24): Cys-PEG
HXQGTFTSDYSKYLDEQAAKEFICWLVKG

SEQ ID NO: 257 - protein, 29 aa, Artificial Sequence
  Synthetic peptide
  MISC_FEATURE: c-term amidation
  MOD_RES (2)..(2): D-Ala
  MOD_RES (24)..(24): Cys-PEG
HXQGTFTSDYSKYLDERRAQDFVCWLMNT

SEQ ID NO: 258 - protein, 29 aa, Artificial Sequence
  Synthetic peptide
  MISC_FEATURE: c-term amidation
  MOD_RES (2)..(2): D-Ala
  MOD_RES (24)..(24): Cys-PEG
HXQGTFTSDYSKYLDERRAKDFVCWLMNT

SEQ ID NO: 259 - protein, 29 aa, Artificial Sequence
  Synthetic peptide
  MISC_FEATURE: c-term amidation
  MOD_RES (2)..(2): D-Ala
  MISC_FEATURE (16)..(20): Lactam ring between side chains at positions 16 and 20
  MOD_RES (24)..(24): Cys-PEG
HXQGTFTSDYSKYLDERRAKDFVCWLMNT

SEQ ID NO: 260 - protein, 29 aa, Artificial Sequence
  Synthetic peptide
  MISC_FEATURE: c-term amidation
  MOD_RES (2)..(2): D-Ala
  MISC_FEATURE (12)..(16): Lactam ring between side chrains at positions 12 and 16
  MOD_RES (24)..(24): Cys-PEG
HXQGTFTSDYSKYLDERRAQDFVCWLMNT

SEQ ID NO: 261 - protein, 29 aa, Artificial Sequence
  Synthetic peptide
  MISC_FEATURE: c-term amidation; lactam ring between side chains at positions 12 and 16
  MOD_RES (2)..(2): D-Ala
  MOD_RES (24)..(24): Cys-PEG
HXQGTFTSDYSKYLDERRAKDFVCWLMNT

SEQ ID NO: 262 - protein, 29 aa, Artificial Sequence
  Synthetic peptide
  MISC_FEATURE: c-term amidation
  MOD_RES (2)..(2): D-Ala
  MISC_FEATURE (16)..(20): Lactam ring between side chains at positions 16 and 20
  MOD_RES (24)..(24): Cys-PEG
HXQGTFTSDYSKYLDKRRAEDFVCWLMNT

SEQ ID NO: 263 - protein, 29 aa, Artificial Sequence
  Synthetic peptide
  MISC_FEATURE: c-term amidation
  MOD_RES (2)..(2): D-Ala
  MOD_RES (24)..(24): Cys-PEG
HXQGTFTSDYSKYLDERAAKDFVCWLMNT

SEQ ID NO: 264 - protein, 29 aa, Artificial Sequence
  Synthetic peptide
  MISC_FEATURE: c-term amidation
  MOD_RES (2)..(2): D-Ala
  MISC_FEATURE (16)..(20): Lactam ring between side chains at positions 16 and 20
  MOD_RES (24)..(24): Cys-PEG
HXQGTFTSDYSKYLDERAAKDFVCWLMNT

SEQ ID NO: 265 - protein, 29 aa, Artificial Sequence
  Synthetic peptide
  MISC_FEATURE: c-term amidation
  MOD_RES (2)..(2): D-Ala
  MISC_FEATURE (12)..(16): Lactam ring between side chains at positions 12 and 16
  MOD_RES (24)..(24): Cys-PEG
HXQGTFTSDYSKYLDERAAQDFVCWLMNT

SEQ ID NO: 266 - protein, 29 aa, Artificial Sequence
  Synthetic peptide
  MISC_FEATURE: c-term amidation
  MOD_RES (2)..(2): D-Ala
  MISC_FEATURE (12)..(16): Lactam ring betwee side chains at positions 12 and 16
  MOD_RES (24)..(24): Cys-PEG
HXQGTFTSDYSKYLDERAAKDFVCWLMNT

SEQ ID NO: 267 - protein, 29 aa, Artificial Sequence
  Synthetic peptide
  MISC_FEATURE: c-term amidation
  MOD_RES (2)..(2): D-Ala
  MISC_FEATURE (16)..(20): Lactam ring between side chains at positions 16 and 20
  MOD_RES (24)..(24): Cys-PEG
HXQGTFTSDYSKYLDKRAAEDFVCWLMNT

SEQ ID NO: 268 - protein, 29 aa, Artificial Sequence
  Synthetic peptide
  MISC_FEATURE: c-term amidation
  MOD_RES (2)..(2): D-Ala
  MOD_RES (24)..(24): Cys-PEG
HXQGTFTSDYSKYLDEQAAKEFICWLMNT

SEQ ID NO: 269 - protein, 29 aa, Artificial Sequence
  Synthetic peptide
  MISC_FEATURE: c-term amidation
  MOD_RES (2)..(2): D-Ala
  MISC_FEATURE (12)..(16): Lactam ring betwee side chains at positions 12 and 16
  MOD_RES (24)..(24): Cys-PEG
HXQGTFTSDYSKYLDEQAAKEFICWLMNT

SEQ ID NO: 270 - protein, 29 aa, Artificial Sequence
  Synthetic peptide
  MISC_FEATURE: c-term amidation
  MOD_RES (2)..(2): D-Ala
  MISC_FEATURE (16)..(20): Lactam ring betwee side chains at positions 16 and 20
  MOD_RES (24)..(24): Cys-PEG
HXQGTFTSDYSKYLDEQAAKEFICWLMNT

SEQ ID NO: 271 - protein, 29 aa, Artificial Sequence
  Synthetic peptide
  MISC_FEATURE: c-term amidation
  MOD_RES (2)..(2): D-Ala
  MOD_RES (24)..(24): Cys-PEG
HXQGTFTSDYSKYLDEQAAKEFICWLVKG

SEQ ID NO: 272 - protein, 29 aa, Artificial Sequence
  Synthetic peptide
  MISC_FEATURE: c-term amidation
  MOD_RES (2)..(2): D-Ala
  MISC_FEATURE (12)..(16): Lactam ring between side chains at positions 12 and 16
  MOD_RES (24)..(24): Cys-PEG
HXQGTFTSDYSKYLDEQAAKEFICWLVKG

SEQ ID NO: 273 - protein, 29 aa, Artificial Sequence
  Synthetic peptide
  MISC_FEATURE: c-term amidation
  MOD_RES (2)..(2): D-Ala
  MISC_FEATURE (16)..(20): Lactam ring between side chains at positions 16 and 20
  MOD_RES (24)..(24): Cys-PEG
HXQGTFTSDYSKYLDEQAAKEFICWLVKG

SEQ ID NO: 274 - protein, 29 aa, Artificial Sequence
  Synthetic peptide
  MISC_FEATURE: c-term amidation
  MOD_RES (24)..(24): Cys-PEG
HSEGTFTSDYSKYLDERRAQDFVCWLMNT

SEQ ID NO: 275 - protein, 29 aa, Artificial Sequence
  Synthetic peptide
  MISC_FEATURE: c-term amidation
  MOD_RES (24)..(24): Cys-PEG
HSEGTFTSDYSKYLDERRAKDFVCWLMNT

SEQ ID NO: 276 - protein, 29 aa, Artificial Sequence
  Synthetic peptide
  MISC_FEATURE: c-term amidation
  MISC_FEATURE (16)..(20): Lactam ring between side chains at positions 16 and 20
  MOD_RES (24)..(24): Cys-PEG
HSEGTFTSDYSKYLDERRAKDFVCWLMNT

SEQ ID NO: 277 - protein, 29 aa, Artificial Sequence
  Synthetic peptide
  MISC_FEATURE: c-term amidation
  MISC_FEATURE (12)..(16): Lactam ring between side chains at positions 12 and 16
  MOD_RES (24)..(24): Cys-PEG
HSEGTFTSDYSKYLDERRAQDFVCWLMNT

SEQ ID NO: 278 - protein, 29 aa, Artificial Sequence
  Synthetic peptide
  MISC_FEATURE: c-term amidation
  MISC_FEATURE (12)..(16): Lactam ring between side chains at positions 12 and 16
  MOD_RES (24)..(24): Cys-PEG
HSEGTFTSDYSKYLDERRAKDFVCWLMNT

SEQ ID NO: 279 - protein, 29 aa, Artificial Sequence
  Synthetic peptide
  MISC_FEATURE: c-term amidation
  MISC_FEATURE (16)..(20): Lactam ring between side chains at positions 16 and 20
  MOD_RES (24)..(24): Cys-PEG
HSEGTFTSDYSKYLDKRRAEDFVCWLMNT

SEQ ID NO: 280 - protein, 29 aa, Artificial Sequence
  Synthetic peptide
  MISC_FEATURE: c-term amidation
  MOD_RES (24)..(24): Cys-PEG
HSEGTFTSDYSKYLDERAAKDFVCWLMNT

SEQ ID NO: 281 - protein, 29 aa, Artificial Sequence
  Synthetic peptide
  MISC_FEATURE: c-term amidation
  MISC_FEATURE (16)..(20): Lactam ring between side chains at positions 16 and 20
  MOD_RES (24)..(24): Cys-PEG
HSEGTFTSDYSKYLDERAAKDFVCWLMNT

SEQ ID NO: 282 - protein, 29 aa, Artificial Sequence
  Synthetic peptide
  MISC_FEATURE: c-term amidation
  MISC_FEATURE (12)..(16): Lactam ring between side chains at positions 12 and 16
  MOD_RES (24)..(24): Cys-PEG
HSEGTFTSDYSKYLDERAAQDFVCWLMNT

SEQ ID NO: 283 - protein, 29 aa, Artificial Sequence
  Synthetic peptide
  MISC_FEATURE: c-term amidation
  MISC_FEATURE (12)..(16): Lactam ring between side chains at positions 12 and 16
  MOD_RES (24)..(24): Cys-PEG
HSEGTFTSDYSKYLDERAAKDFVCWLMNT

SEQ ID NO: 284 - protein, 29 aa, Artificial Sequence
  Synthetic peptide
  MISC_FEATURE: c-term amidation
  MISC_FEATURE (16)..(20): Lactam ring between side chains at positions 16 and 20
  MOD_RES (24)..(24): Cys-PEG
HSEGTFTSDYSKYLDKRAAEDFVCWLMNT

SEQ ID NO: 285 - protein, 29 aa, Artificial Sequence
  Synthetic peptide
  MISC_FEATURE: c-term amidation
  MOD_RES (24)..(24): Cys-PEG
HSEGTFTSDYSKYLDEQAAKEFICWLMNT

SEQ ID NO: 286 - protein, 29 aa, Artificial Sequence
  Synthetic peptide
  MISC_FEATURE: c-term amidation
  MISC_FEATURE (12)..(16): Lactam ring between side chains at positions 12 and 16
  MOD_RES (24)..(24): Cys-PEG
HSEGTFTSDYSKYLDEQAAKEFICWLMNT

SEQ ID NO: 287 - protein, 29 aa, Artificial Sequence
  Synthetic peptide
  MISC_FEATURE: c-term amidation
  MISC_FEATURE (16)..(20): Lactam ring between side chain at positions 16 and 20
  MOD_RES (24)..(24): Cys-PEG
HSEGTFTSDYSKYLDEQAAKEFICWLMNT

SEQ ID NO: 288 - protein, 29 aa, Artificial Sequence
  Synthetic peptide
  MISC_FEATURE: c-term amidation
  MOD_RES (24)..(24): Cys-PEG
HSEGTFTSDYSKYLDEQAAKEFICWLVKG

SEQ ID NO: 289 - protein, 29 aa, Artificial Sequence
  Synthetic peptide
  MISC_FEATURE: c-term amidation
  MISC_FEATURE (12)..(16): Lactam ring between side chains at positions 12 and 16
  MOD_RES (24)..(24): Cys-PEG
HSEGTFTSDYSKYLDEQAAKEFICWLVKG

SEQ ID NO: 290 - protein, 29 aa, Artificial Sequence
  Synthetic peptide
  MISC_FEATURE: c-term amidation
  MISC_FEATURE (16)..(20): Lactam ring between side chains at positions 16 and 20
  MOD_RES (24)..(24): Cys-PEG
HSEGTFTSDYSKYLDEQAAKEFICWLVKG

SEQ ID NO: 291 - protein, 29 aa, Artificial Sequence
  Synthetic peptide
  MISC_FEATURE: c-term amidation
  MOD_RES (1)..(1): (Des-amino)His
  MOD_RES (24)..(24): Cys-PEG
XSEGTFTSDYSKYLDERRAQDFVCWLMNT

SEQ ID NO: 292 - protein, 29 aa, Artificial Sequence
  Synthetic peptide
  MISC_FEATURE: c-term amidation
  MOD_RES (1)..(1): (Des-amino)His
  MOD_RES (24)..(24): Cys-PEG
XSEGTFTSDYSKYLDERRAKDFVCWLMNT

SEQ ID NO: 293 - protein, 29 aa, Artificial Sequence
  Synthetic peptide
  MISC_FEATURE: c-term amidation
  MOD_RES (1)..(1): (Des-amino)His
  MISC_FEATURE (16)..(20): Lactam ring between side chains at positions 16 and 20
  MOD_RES (24)..(24): Cys-PEG
XSEGTFTSDYSKYLDERRAKDFVCWLMNT

SEQ ID NO: 294 - protein, 29 aa, Artificial Sequence
  Synthetic peptide
  MISC_FEATURE: c-term amidation
  MOD_RES (1)..(1): (Des-amino)His
  MISC_FEATURE (12)..(16): Lactam ring between side chains at positions 12 and 16
  MOD_RES (24)..(24): Cys-PEG
XSEGTFTSDYSKYLDERRAQDFVCWLMNT

SEQ ID NO: 295 - protein, 29 aa, Artificial Sequence
  Synthetic peptide
  MISC_FEATURE: c-term amidation
  MOD_RES (1)..(1): (Des-amino)His
  MISC_FEATURE (12)..(16): Lactam ring between side chains at positions 12 and 16
  MOD_RES (24)..(24): Cys-PEG
XSEGTFTSDYSKYLDERRAKDFVCWLMNT

SEQ ID NO: 296 - protein, 29 aa, Artificial Sequence
  Synthetic peptide
  MISC_FEATURE: c-term amidation
  MOD_RES (1)..(1): (Des-amino)His
  MISC_FEATURE (16)..(20): Lactam ring between side chains at positions 16 and 20
  MOD_RES (24)..(24): Cys-PEG
XSEGTFTSDYSKYLDKRRAEDFVCWLMNT

SEQ ID NO: 297 - protein, 29 aa, Artificial Sequence
  Synthetic peptide
  MISC_FEATURE: c-term amidation
  MOD_RES (1)..(1): (Des-amino)His
  MOD_RES (24)..(24): Cys-PEG
XSEGTFTSDYSKYLDERAAKDFVCWLMNT

SEQ ID NO: 298 - protein, 29 aa, Artificial Sequence
  Synthetic peptide
  MISC_FEATURE: c-term amidation
  MOD_RES (1)..(1): (Des-amino)His
  MISC_FEATURE (16)..(20): Lactam ring between side chains at positions 16 and 20
  MOD_RES (24)..(24): Cys-PEG
XSEGTFTSDYSKYLDERAAKDFVCWLMNT

SEQ ID NO: 299 - protein, 29 aa, Artificial Sequence
  Synthetic peptide
  MISC_FEATURE: c-term amidation
  MOD_RES (1)..(1): (Des-amino)His
  MISC_FEATURE (12)..(16): Lactam ring between side chains at positions 12 and 16
  MOD_RES (24)..(24): Cys-PEG
XSEGTFTSDYSKYLDERAAQDFVCWLMNT

SEQ ID NO: 300 - protein, 29 aa, Artificial Sequence
  Synthetic peptide
  MISC_FEATURE: c-term amidation
  MOD_RES (1)..(1): (Des-amino)His
  MISC_FEATURE (12)..(16): Lactam ring between side chains at positions 12 and 16
  MOD_RES (24)..(24): Cys-PEG
XSEGTFTSDYSKYLDERAAKDFVCWLMNT

SEQ ID NO: 301 - protein, 29 aa, Artificial Sequence
  Synthetic peptide
  MISC_FEATURE: c-term amidation
  MOD_RES (1)..(1): (Des-amino)His
  MISC_FEATURE (16)..(20): Lactam ring between side chains at positions 16 and 20
  MOD_RES (24)..(24): Cys-PEG
XSEGTFTSDYSKYLDKRAAEDFVCWLMNT

SEQ ID NO: 302 - protein, 29 aa, Artificial Sequencce
  Synthetic peptide
  MISC_FEATURE: c-term amidation
  MOD_RES (1)..(1): (Des-amino)His
  MOD_RES (24)..(24): Cys-PEG
XSEGTFTSDYSKYLDEQAAKGFICWLMNT

SEQ ID NO: 303 - protein, 29 aa, Artificial Sequence
  Synthetic peptide
  MISC_FEATURE: c-term amidation
  MOD_RES (1)..(1): (Des-amino)His
  MISC_FEATURE (12)..(16): Lactam ring between side chains at positions 12 and 16
  MOD_RES (24)..(24): Cys-PEG
XSEGTFTSDYSKYLDEQAAKGFICWLMNT

SEQ ID NO: 304 - protein, 29 aa, Artificial Sequence
  Synthetic peptide
  MISC_FEATURE: c-term amidation
  MOD_RES (1)..(1): (Des-amino)His
  MISC_FEATURE (16)..(20): Lactam ring between side chains at positions 16 and 20
  MOD_RES (24)..(24): Cys-PEG
XSEGTFTSDYSKYLDEQAAKGFICWLMNT

SEQ ID NO: 305 - protein, 29 aa, Artificial Sequencce
  Synthetic peptide
  MISC_FEATURE: c-term amidation
  MOD_RES (1)..(1): (des-amino)His
  MOD_RES (24)..(24): Cys-PEG
XSEGTFTSDYSKYLDEQAAKGFICWLVKG

SEQ ID NO: 306 - protein, 29 aa, Artificial Sequence
  Synthetic peptide
  MISC_FEATURE: c-term amidation
  MOD_RES (1)..(1): (Des-amino)His
  MISC_FEATURE (12)..(16): Lactam ring between side chains at positions 12 and 16
  MOD_RES (24)..(24): Cys-PEG
XSEGTFTSDYSKYLDEQAAKGFICWLVKG

SEQ ID NO: 307 - protein, 29 aa, Artificial Sequence
  Synthetic peptide
  MISC_FEATURE: c-term amidation
  MOD_RES (1)..(1): (Des-amino)His
  MISC_FEATURE (16)..(20): Lactam ring between side chains at positions 16 and 20
  MOD_RES (24)..(24): Cys-PEG
XSEGTFTSDYSKYLDEQAAKGFICWLVKG

SEQ ID NO: 308 - protein, 29 aa, Artificial Sequence
  Synthetic peptide
  MISC_FEATURE: c-term amidation
  MOD_RES (2)..(2): Aminoisobutyric acid
  MOD_RES (24)..(24): Cys-PEG
HXEGTFTSDYSKYLDERRAQDFVCWLMNT

SEQ ID NO: 309 - protein, 29 aa, Artificial Sequence
  Synthetic peptide
  MISC_FEATURE: c-term amidation
  MOD_RES (2)..(2): Aminoisobutyric acid
  MOD_RES (24)..(24): Cys-PEG
HXEGTFTSDYSKYLDERRAKDFVCWLMNT

SEQ ID NO: 310 - protein, 29 aa, Artificial Sequence
  Synthetic peptide
  MISC_FEATURE: c-term amidation
  MOD_RES (2)..(2): Aminoisobutyric acid
  MISC_FEATURE (16)..(20): Lactam ring between side chains at positions 16 and 20
  MOD_RES (24)..(24): Cys-PEG
HXEGTFTSDYSKYLDERRAKDFVCWLMNT

SEQ ID NO: 311 - protein, 29 aa, Artificial Sequence
  Synthetic peptide
  MISC_FEATURE: c-term amidation
  MOD_RES (2)..(2): Aminoisobutyric acid
  MISC_FEATURE (12)..(16): Lactam ring between side chain at positions 12 and 16
  MOD_RES (24)..(24): Cys-PEG
HXEGTFTSDYSKYLDERRAQDFVCWLMNT

SEQ ID NO: 312 - protein, 29 aa, Artificial Sequence
  Synthetic peptide
  MISC_FEATURE: c-term amidation
  MOD_RES (2)..(2): Aminoisobutyric acid
  MISC_FEATURE (12)..(16): Lactam ring between side chains at positions 12 and 16
  MOD_RES (24)..(24): Cys-PEG
HXEGTFTSDYSKYLDERRAKDFVCWLMNT

SEQ ID NO: 313 - protein, 29 aa, Artificial Sequence
  Synthetic peptide
  MISC_FEATURE: c-term amidation
  MOD_RES (2)..(2): Aminoisobutyric acid
  MISC_FEATURE (16)..(20): Lactam ring between side chains at positions 16 and 20
  MOD_RES (24)..(24): Cys-PEG
HXEGTFTSDYSKYLDKRRAEDFVCWLMNT

SEQ ID NO: 314 - protein, 29 aa, Artificial Sequence
  Synthetic peptide
  MISC_FEATURE: c-term amidation
  MOD_RES (2)..(2): Aminoisobutyric acid
  MOD_RES (24)..(24): Cys-PEG
HXEGTFTSDYSKYLDERAAKDFVCWLMNT

SEQ ID NO: 315 - protein, 29 aa, Artificial Sequence
  Synthetic peptide
  MISC_FEATURE: c-term amidation
  MOD_RES (2)..(2): Aminoisobutyric acid
  MISC_FEATURE (16)..(20): Lactam ring between seide chains at positions 16 and 20
  MOD_RES (24)..(24): Cys-PEG
HXEGTFTSDYSKYLDERAAKDFVCWLMNT

SEQ ID NO: 316 - protein, 29 aa, Artificial Sequence
  Synthetic peptide
  MISC_FEATURE: c-term amidation
  MOD_RES (2)..(2): Aminoisobutyric acid
  MISC_FEATURE (12)..(16): Lactam ring between side chains at positions 12 and 16
  MOD_RES (24)..(24): Cys-PEG
HXEGTFTSDYSKYLDERAAQDFVCWLMNT

SEQ ID NO: 317 - protein, 29 aa, Artificial Sequence
  Synthetic peptide
  MISC_FEATURE: c-term amidation
  MOD_RES (2)..(2): Aminoisobutyric acid
  MISC_FEATURE (12)..(16): Lactam ring between side chains at positions 12 adn 16
  MOD_RES (24)..(24): Cys-PEG
HXEGTFTSDYSKYLDERAAKDFVCWLMNT

SEQ ID NO: 318 - protein, 29 aa, Artificial Sequence
  Synthetic peptide
  MISC_FEATURE: c-term amidation
  MOD_RES (2)..(2): Aminoisobutyric acid
  MISC_FEATURE (16)..(20): Lactam ring between side chains at positions 16 and 20
  MOD_RES (24)..(24): Cys-PEG
HXEGTFTSDYSKYLDKRAAEDFVCWLMNT

SEQ ID NO: 319 - protein, 29 aa, Artificial Sequence
  Synthetic peptide
  MISC_FEATURE: c-term amidation
  MOD_RES (2)..(2): Aminoisobutyric acid
  MOD_RES (24)..(24): Cys-PEG
HXEGTFTSDYSKYLDEQAAKEFICWLMNT

SEQ ID NO: 320 - protein, 29 aa, Artificial Sequence
  Synthetic peptide
  MISC_FEATURE: c-term amidation
  MOD_RES (2)..(2): Aminoisobutyric acid
  MISC_FEATURE (12)..(16): Lactam ring between side chains at positions 12 and 16
  MOD_RES (24)..(24): Cys-PEG
HXEGTFTSDYSKYLDEQAAKEFICWLMNT

SEQ ID NO: 321 - protein, 29 aa, Artificial Sequence
  Synthetic peptide
  MISC_FEATURE: c-term amidation
  MOD_RES (2)..(2): Aminoisobutyric acid
  MISC_FEATURE (16)..(20): Lactam ring between side chains at position 16 and 20
  MOD_RES (24)..(24): Cys-PEG
HXEGTFTSDYSKYLDEQAAKEFICWLMNT

SEQ ID NO: 322 - protein, 29 aa, Artificial Sequence
  Synthetic peptide
  MISC_FEATURE: c-term amidation
  MOD_RES (2)..(2): Aminoisobutyric acid
  MOD_RES (24)..(24): Cys-PEG
HXEGTFTSDYSKYLDEQAAKEFICWLVKG

SEQ ID NO: 323 - protein, 29 aa, Artificial Sequence
  Synthetic peptide
  MISC_FEATURE: c-term amidation
  MOD_RES (2)..(2): Aminoisobutyric acid
  MISC_FEATURE (12)..(16): Lactam ring between side chains at positions 12 and 16
  MOD_RES (24)..(24): Cys-PEG
HXEGTFTSDYSKYLDEQAAKEFICWLVKG

SEQ ID NO: 324 - protein, 29 aa, Artificial Sequence
  Synthetic peptide
  MISC_FEATURE: c-term amidation
  MOD_RES (2)..(2): Aminoisobutyric acid
  MISC_FEATURE (16)..(20): Lactam ring between side chains at position 16 and 20
  MOD_RES (24)..(24): Cys-PEG
HXEGTFTSDYSKYLDEQAAKEFICWLVKG

SEQ ID NO: 325 - protein, 29 aa, Artificial Sequence
  Synthetic peptide
  MISC_FEATURE: c-term amidation
  MOD_RES (2)..(2): D-Ala
  MOD_RES (24)..(24): Cys-PEG
HXEGTFTSDYSKYLDERRAQDFVCWLMNT

SEQ ID NO: 326 - protein, 29 aa, Artificial Sequence
  Synthetic peptide
  MISC_FEATURE: c-term amidation
  MOD_RES (2)..(2): D-Ala
  MOD_RES (24)..(24): Cys-PEG
HXEGTFTSDYSKYLDERRAKDFVCWLMNT

SEQ ID NO: 327 - protein, 29 aa, Artificial Sequence
  Synthetic peptide
  MISC_FEATURE: c-term amidation
  MOD_RES (2)..(2): D-Ala
  MISC_FEATURE (16)..(20): Lactam ring between side chains at positions 16 and 20
  MOD_RES (24)..(24): Cys-PEG
HXEGTFTSDYSKYLDERRAKDFVCWLMNT

SEQ ID NO: 328 - protein, 29 aa, Artificial Sequence
  Synthetic peptide
  MISC_FEATURE: c-term amidation
  MOD_RES (2)..(2): D-Ala
  MISC_FEATURE (12)..(16): Lactam between side chains at positions 12 and 16
  MOD_RES (24)..(24): Cys-PEG
HXEGTFTSDYSKYLDERRAQDFVCWLMNT

SEQ ID NO: 329 - protein, 29 aa, Artificial Sequence
  Synthetic peptide
  MISC_FEATURE: c-term amidation
  MOD_RES (2)..(2): D-Ala
  MISC_FEATURE (12)..(16): Lactam ring between side chains at positions 12 and 16
  MOD_RES (24)..(24): Cys-PEG
HXEGTFTSDYSKYLDERRAKDFVCWLMNT

SEQ ID NO: 330 - protein, 29 aa, Artificial Sequence
  Synthetic peptide
  MISC_FEATURE: c-term amidation
  MOD_RES (2)..(2): D-Ala
  MISC_FEATURE (16)..(20): Lactam ring between side chains at positions 16 and 20
  MOD_RES (24)..(24): Cys-PEG
HXEGTFTSDYSKYLDKRRAEDFVCWLMNT

SEQ ID NO: 331 - protein, 29 aa, Artificial Sequence
  Synthetic peptide
  MISC_FEATURE: c-term amidation
  MOD_RES (2)..(2): D-Ala
  MOD_RES (24)..(24): Cys-PEG
HXEGTFTSDYSKYLDERAAKDFVCWLMNT

SEQ ID NO: 332 - protein, 29 aa, Artificial Sequence
  Synthetic peptide
  MISC_FEATURE: c-term amidation
  MOD_RES (2)..(2): D-Ala
  MISC_FEATURE (16)..(20): Lactam ring between side chains at positions 16 and 20
  MOD_RES (24)..(24): Cys-PEG
HXEGTFTSDYSKYLDERAAKDFVCWLMNT

SEQ ID NO: 333 - protein, 29 aa, Artificial Sequence
  Synthetic peptide
  MISC_FEATURE: c-term amidation
  MOD_RES (2)..(2): D-Ala
  MISC_FEATURE (12)..(16): Lactam ring between side chains at positions 12 and 16
  MOD_RES (24)..(24): Cys-PEG
HXEGTFTSDYSKYLDERAAQDFVCWLMNT

SEQ ID NO: 334 - protein, 29 aa, Artificial Sequence
  Synthetic peptide
  MISC_FEATURE: c-term amidation
  MOD_RES (2)..(2): D-Ala
  MISC_FEATURE (12)..(16): Lactam ring between side chains at positions 12 and 16
  MOD_RES (24)..(24): Cys-PEG
HXEGTFTSDYSKYLDERAAKDFVCWLMNT

SEQ ID NO: 335 - protein, 29 aa, Artificial Sequence
  Synthetic peptide
  MISC_FEATURE: c-term amidation
  MOD_RES (2)..(2): D-Ala
  MISC_FEATURE (12)..(16): Lactam ring between side chainst at positions 16 and 20
  MOD_RES (24)..(24): Cys-PEG
HXEGTFTSDYSKYLDKRAAEDFVCWLMNT

SEQ ID NO: 336 - protein, 29 aa, Artificial Sequence
  Synthetic peptide
  MISC_FEATURE: c-term amidation
  MOD_RES (2)..(2): D-Ala
  MOD_RES (24)..(24): Cys-PEG
HXEGTFTSDYSKYLDEQAAKEFICWLMNT

SEQ ID NO: 337 - protein, 29 aa, Artificial Sequence
  Synthetic peptide
  MISC_FEATURE: c-term amidation
  MOD_RES (2)..(2): D-Ala
  MISC_FEATURE (12)..(16): Lactam ring between side chains at positions 12 and 16
  MOD_RES (24)..(24): Cys-PEG
HXEGTFTSDYSKYLDEQAAKEFICWLMNT

SEQ ID NO: 338 - protein, 29 aa, Artificial Sequence
  Synthetic peptide
  MISC_FEATURE: c-term amidation
  MOD_RES (2)..(2): D-Ala
  MISC_FEATURE (16)..(20): Lactam right between side chains at positions 16 and 20
  MOD_RES (24)..(24): Cys-PEG
HXEGTFTSDYSKYLDEQAAKEFICWLMNT

SEQ ID NO: 339 - protein, 29 aa, Artificial Sequence
  Synthetic peptide
  MISC_FEATURE: c-term amidation
  MOD_RES (2)..(2): D-Ala
  MOD_RES (24)..(24): Cys-PEG
HXEGTFTSDYSKYLDEQAAKEFICWLVKG

SEQ ID NO: 340 - protein, 29 aa, Artificial Sequence
  Synthetic peptide
  MISC_FEATURE: c-term amidation
  MOD_RES (2)..(2): D-Ala
  MISC_FEATURE (12)..(16): Lactam ring between side chains at positions 12 and 16
  MOD_RES (24)..(24): Cys-PEG
HXEGTFTSDYSKYLDEQAAKEFICWLVKG

SEQ ID NO: 341 - protein, 29 aa, Artificial Sequence
  Synthetic peptide
  MISC_FEATURE: c-term amidation
  MOD_RES (2)..(2): D-Ala
  MISC_FEATURE (16)..(20): Lactam ring between side chains at positions 16 and 20
  MOD_RES (24)..(24): Cys-PEG
HXEGTFTSDYSKYLDEQAAKEFICWLVKG

SEQ ID NO: 342 - protein, 29 aa, Artificial Sequence
  Synthetic peptide
  MISC_FEATURE: c-term amidation
  MOD_RES (16)..(16): Cys-PEG
HSQGTFTSDYSKYLDCRRAKDFVQWLMNT

SEQ ID NO: 343 - protein, 29 aa, Artificial Sequence
  Synthetic peptide
  MISC_FEATURE: c-term amidation
  MOD_RES (16)..(16): Cys-PEG
HSQGTFTSDYSKYLDCRAAKDFVQWLMNT

SEQ ID NO: 344 - protein, 29 aa, Artificial Sequence
  Synthetic peptide
  MISC_FEATURE: c-term amidation
  MOD_RES (16)..(16): Cys-PEG
HSQGTFTSDYSKYLDCQAAKEFIAWLMNT

SEQ ID NO: 345 - protein, 29 aa, Artificial Sequence
  Synthetic peptide
  MISC_FEATURE: c-term amidation
  MOD_RES (16)..(16): Cys-PEG
HSQGTFTSDYSKYLDCQAAKEFIAWLVKG

SEQ ID NO: 346 - protein, 29 aa, Artificial Sequence
  Synthetic peptide
  MISC_FEATURE: c-term amidation
  MOD_RES (1)..(1): (Des-amino)His
  MOD_RES (16)..(16): Cys-PEG
XSQGTFTSDYSKYLDCRRAKDFVQWLMNT

SEQ ID NO: 347 - protein, 29 aa, Artificial Sequence
  Synthetic peptide
  MISC_FEATURE: c-term amidation
  MOD_RES (1)..(1): (Des-amino)His
  MOD_RES (16)..(16): Cys-PEG
XSQGTFTSDYSKYLDCRAAKDFVQWLMNT

SEQ ID NO: 348 - protein, 29 aa, Artificial Sequence
  Synthetic peptide
  MISC_FEATURE: c-term amidation
  MOD_RES (1)..(1): (Des-amino)His
  MOD_RES (16)..(16): Cys-PEG
XSQGTFTSDYSKYLDCQAAKEFIAWLMNT

SEQ ID NO: 349 - protein, 29 aa, Artificial Sequence
  Synthetic peptide
  MISC_FEATURE: c-term amidation
  MOD_RES (1)..(1): (Des-amino)His
  MOD_RES (16)..(16): Cys-PEG
XSQGTFTSDYSKYLDCQAAKEFIAWLVKG

SEQ ID NO: 350 - protein, 29 aa, Artificial Sequence
  Synthetic peptide
  MISC_FEATURE: c-term amidation
  MOD_RES (1)..(1): (Des-amino)His
  MOD_RES (16)..(16): Cys-PEG
XSQGTFTSDYSKYLDCQAAKEFIAWLMNT

SEQ ID NO: 351 - protein, 29 aa, Artificial Sequence
  Synthetic peptide
  MISC_FEATURE: c-term amidation
  MOD_RES (2)..(2): Aminoisobutyric acid
  MOD_RES (16)..(16): Cys-PEG
HXQGTFTSDYSKYLDCRAAKDFVQWLMNT

SEQ ID NO: 352 - protein, 29 aa, Artificial Sequence
  Synthetic peptide
  MISC_FEATURE: c-term amidation
  MOD_RES (2)..(2): Aminoisobutyric acid
  MOD_RES (16)..(16): Cys-PEG
HXQGTFTSDYSKYLDCQAAKEFIAWLMNT

SEQ ID NO: 353 - protein, 29 aa, Artificial Sequence
  Synthetic peptide
  MISC_FEATURE: c-term amidation
  MOD_RES (2)..(2): Aminoisobutyric acid
  MOD_RES (16)..(16): Cys-PEG
HXQGTFTSDYSKYLDCQAAKEFIAWLVKG

SEQ ID NO: 354 - protein, 29 aa, Artificial Sequence
  Synthetic peptide
  MISC_FEATURE: c-term amidation
  MOD_RES (2)..(2): D-Ala
  MOD_RES (16)..(16): Cys-PEG
HXQGTFTSDYSKYLDCRRAKDFVQWLMNT

SEQ ID NO: 355 - protein, 29 aa, Artificial Sequence
  Synthetic peptide
  MISC_FEATURE: c-term amidation
  MOD_RES (2)..(2): D-Ala
  MOD_RES (16)..(16): Cys-PEG
HXQGTFTSDYSKYLDCRAAKDFVQWLMNT

SEQ ID NO: 356 - protein, 29 aa, Artificial Sequence
  Synthetic peptide
  MISC_FEATURE: c-term amidation
  MOD_RES (2)..(2): D-Ala
  MOD_RES (16)..(16): Cys-PEG
HXQGTFTSDYSKYLDCQAAKEFIAWLMNT

SEQ ID NO: 357 - protein, 29 aa, Artificial Sequence
  Synthetic peptide
  MISC_FEATURE: c-term amidation
  MOD_RES (2)..(2): D-Ala
  MOD_RES (16)..(16): Cys-PEG
HXQGTFTSDYSKYLDCQAAKEFIAWLVKG

SEQ ID NO: 358 - protein, 29 aa, Artificial Sequence
  Synthetic peptide
  MISC_FEATURE: c-term amidation
  MOD_RES (16)..(16): Cys-PEG
HSEGTFTSDYSKYLDCRRAKDFVQWLMNT

SEQ ID NO: 359 - protein, 29 aa, Artificial Sequence
  Synthetic peptide
  MISC_FEATURE: c-term amidation
  MOD_RES (16)..(16): Cys-PEG
HSEGTFTSDYSKYLDCRAAKDFVQWLMNT

SEQ ID NO: 360 - protein, 29 aa, Artificial Sequence
  Synthetic peptide
  MISC_FEATURE: c-term amidation
  MOD_RES (16)..(16): Cys-PEG
HSEGTFTSDYSKYLDCQAAKEFIAWLMNT

SEQ ID NO: 361 - protein, 29 aa, Artificial Sequence
  Synthetic peptide
  MISC_FEATURE: c-term amidation
  MOD_RES (16)..(16): Cys-PEG
HSEGTFTSDYSKYLDCQAAKEFIAWLVKG

SEQ ID NO: 362 - protein, 29 aa, Artificial Sequence
  Synthetic peptide
  MISC_FEATURE: c-term amidation
  MOD_RES (1)..(1): (Des-amino)His
  MOD_RES (16)..(16): Cys-PEG
XSEGTFTSDYSKYLDCRRAKDFVQWLMNT

SEQ ID NO: 363 - protein, 29 aa, Artificial Sequence
  Synthetic peptide
  MISC_FEATURE: c-term amidation
  MOD_RES (1)..(1): (Des-amino)His
  MOD_RES (16)..(16): Cys-PEG
XSEGTFTSDYSKYLDCRAAKDFVQWLMNT

SEQ ID NO: 364 - protein, 29 aa, Artificial Sequence
  Synthetic peptide
  MISC_FEATURE: c-term amidation
  MOD_RES (1)..(1): (Des-amino)His
  MOD_RES (16)..(16): Cys-PEG
XSEGTFTSDYSKYLDCQAAKEFIAWLMNT

SEQ ID NO: 365 - protein, 29 aa, Artificial Sequence
  Synthetic peptide
  MISC_FEATURE: c-term amidation
  MOD_RES (1)..(1): (Des-amino)His
  MOD_RES (16)..(16): Cys-PEG
XSEGTFTSDYSKYLDCQAAKEFIAWLVKG

SEQ ID NO: 366 - protein, 29 aa, Artificial Sequence
  Synthetic peptide
  MISC_FEATURE: c-term amidation
  MOD_RES (2)..(2): D-Ala
  MOD_RES (16)..(16): Cys-PEG
HXEGTFTSDYSKYLDCRRAKDFVQWLMNT

SEQ ID NO: 367 - protein, 29 aa, Artificial Sequence
  Synthetic peptide
  MISC_FEATURE: c-term amidation
  MOD_RES (2)..(2): D-Ala
  MOD_RES (16)..(16): Cys-PEG
HXEGTFTSDYSKYLDCRAAKDFVQWLMNT

SEQ ID NO: 368 - protein, 29 aa, Artificial Sequence
  Synthetic peptide
  MISC_FEATURE: c-term amidation
  MOD_RES (2)..(2): D-Ala
  MOD_RES (16)..(16): Cys-PEG
HXEGTFTSDYSKYLDCQAAKEFIAWLMNT

SEQ ID NO: 369 - protein, 29 aa, Artificial Sequence
  Synthetic peptide
  MISC_FEATURE: c-term amidation
  MOD_RES (2)..(2): D-Ala
  MOD_RES (16)..(16): Cys-PEG
HXEGTFTSDYSKYLDCQAAKEFIAWLVKG

SEQ ID NO: 370 - protein, 29 aa, Artificial Sequence
  Synthetic peptide
  MISC_FEATURE: c-term amidation
  MOD_RES (2)..(2): D-Ala
  MOD_RES (16)..(16): Cys-PEG
HXEGTFTSDYSKYLDCRRAKDFVQWLMNT

SEQ ID NO: 371 - protein, 29 aa, Artificial Sequence
  Synthetic peptide
  MISC_FEATURE: c-term amidation
  MOD_RES (2)..(2): D-Ala
  MOD_RES (16)..(16): Cys-PEG
HXEGTFTSDYSKYLDCRAAKDFVQWLMNT

SEQ ID NO: 372 - protein, 29 aa, Artificial Sequence
  Synthetic peptide
  MISC_FEATURE: c-term amidation
  MOD_RES (2)..(2): D-Ala
  MOD_RES (16)..(16): Cys-PEG
HXEGTFTSDYSKYLDCQAAKEFIAWLMNT

SEQ ID NO: 373 - protein, 29 aa, Artificial Sequence
  Synthetic peptide
  MISC_FEATURE: c-term amidation
  MOD_RES (2)..(2): D-Ala
  MOD_RES (16)..(16): Cys-PEG
HXEGTFTSDYSKYLDCQAAKEFIAWLVKG

SEQ ID NO: 374 - protein, 29 aa, Artificial Sequence
  Synthetic peptide
  MISC_FEATURE: c-term amidation
HSQGTFTSDYSKYLDERRAQDFVQWLMDT

SEQ ID NO: 375 - protein, 29 aa, Artificial Sequence
  Synthetic peptide
  MISC_FEATURE: c-term amidation
HSQGTFTSDYSKYLDERRAKDFVQWLMDT

SEQ ID NO: 376 - protein, 29 aa, Artificial Sequence
  Synthetic peptide
  MISC_FEATURE: c-term amidation
  MISC_FEATURE (16)..(20): Lactam ring between side chains at positions 16 and 20
HSQGTFTSDYSKYLDERRAKDFVQWLMDT

SEQ ID NO: 377 - protein, 29 aa, Artificial Sequence
  Synthetic peptide
  MISC_FEATURE: c-term amidation
  MISC_FEATURE (12)..(16): Lactam ring between side chains at positions 12 and 16
HSQGTFTSDYSKYLDERRAQDFVQWLMDT

SEQ ID NO: 378 - protein, 29 aa, Artificial Sequence
  Synthetic peptide
  MISC_FEATURE: c-term amidation
  MISC_FEATURE (12)..(16): Lactam ring between side chains at positions 12 and 16
HSQGTFTSDYSKYLDERRAKDFVQWLMDT

SEQ ID NO: 379 - protein, 29 aa, Artificial Sequence
  Synthetic peptide
  MISC_FEATURE: c-term amidation
  MISC_FEATURE (16)..(20): Lactam ring between side chains at positions 16 and 20
HSQGTFTSDYSKYLDKRRAEDFVQWLMDT

SEQ ID NO: 380 - protein, 29 aa, Artificial Sequence
  Synthetic peptide
  MISC_FEATURE: c-term amidation
HSQGTFTSDYSKYLDERAAKDFVQWLMDT

SEQ ID NO: 381 - protein, 29 aa, Artificial Sequence
  Synthetic peptide
  MISC_FEATURE: c-term amidation; lactam ring between side chains at positions 16 and 20
HSQGTFTSDYSKYLDERAAKDFVQWLMDT

SEQ ID NO: 382 - protein, 29 aa, Artificial Sequence
  Synthetic peptide
  MISC_FEATURE: c-term amidation
  MISC_FEATURE (12)..(16): Lactam ring between side chains at positions 12 and 16
HSQGTFTSDYSKYLDERAAQDFVQWLMDT

SEQ ID NO: 383 - protein, 29 aa, Artificial Sequence
  Synthetic peptide
  MISC_FEATURE: c-term amidation
  MISC_FEATURE (12)..(16): Lactam ring between side chains at positions 12 and 16
HSQGTFTSDYSKYLDERAAKDFVQWLMDT

SEQ ID NO: 384 - protein, 29 aa, Artificial Sequence
  Synthetic peptide
  MISC_FEATURE: c-term amidation
  MISC_FEATURE (16)..(20): Lactam ring between side chains at positions 16 and 20
HSQGTFTSDYSKYLDKRAAEDFVQWLMDT

SEQ ID NO: 385 - protein, 29 aa, Artificial Sequence
  Synthetic peptide
  MISC_FEATURE: c-term amidation
HSQGTFTSDYSKYLDEQAAKEFIAWLMDT

SEQ ID NO: 386 - protein, 29 aa, Artificial Sequence
  Synthetic peptide
  MISC_FEATURE: c-term amidation
  MISC_FEATURE (12)..(16): Lactam ring between side chains at positions 12 and 16
HSQGTFTSDYSKYLDEQAAKEFIAWLMDT

SEQ ID NO: 387 - protein, 29 aa, Artificial Sequence
  Synthetic peptide
  MISC_FEATURE: c-term amidation
  MISC_FEATURE (16)..(20): Lactam ring between side chains at positions 16 and 20
HSQGTFTSDYSKYLDEQAAKEFIAWLMDT

SEQ ID NO: 388 - protein, 29 aa, Artificial Sequence
  Synthetic peptide
  MISC_FEATURE: c-term amidation
  MOD_RES (1)..(1): (Des-amino)His
XSQGTFTSDYSKYLDERRAQDFVQWLMDT

SEQ ID NO: 389 - protein, 29 aa, Artificial Sequence
  Synthetic peptide
  MISC_FEATURE: c-term amidation
  MOD_RES (1)..(1): (Des-amino)His
XSQGTFTSDYSKYLDERRAKDFVQWLMDT

SEQ ID NO: 390 - protein, 29 aa, Artificial Sequence
  Synthetic peptide
  MISC_FEATURE: c-term amidation
  MOD_RES (1)..(1): (Des-amino)His
  MISC_FEATURE (16)..(20): Lactam ring between side chains at positions 16 and 20
XSQGTFTSDYSKYLDERRAKDFVQWLMDT

SEQ ID NO: 391 - protein, 29 aa, Artificial Sequence
  Synthetic peptide
  MISC_FEATURE: c-term amidation
  MOD_RES (1)..(1): (Des-amino)His
  MISC_FEATURE (12)..(16): Lactam ring between side chains at positions 12 and 16
XSQGTFTSDYSKYLDERRAQDFVQWLMDT

SEQ ID NO: 392 - protein, 29 aa, Artificial Sequence
  Synthetic peptide
  misc_feature (1)..(1): Xaa can be any naturally occurring amino acid
XSQGTFTSDYSKYLDERRAKDFVQWLMDT

SEQ ID NO: 393 - protein, 29 aa, Artificial Sequence
  Synthetic peptide
  MISC_FEATURE: c-term amidation
  MOD_RES (1)..(1): (Des-amino)His
  MISC_FEATURE (16)..(20): Lactam ring between side chains at positions 16 and 20
XSQGTFTSDYSKYLDKRRAEDFVQWLMDT

SEQ ID NO: 394 - protein, 29 aa, Artificial Sequence
  Synthetic peptide
  MISC_FEATURE: c-term amidation
  MOD_RES (1)..(1): (Des-amino)His
XSQGTFTSDYSKYLDERAAKDFVQWLMDT

SEQ ID NO: 395 - protein, 29 aa, Artificial Sequence
  Synthetic peptide
  MISC_FEATURE: c-term amidation
  MOD_RES (1)..(1): (Des-amino)His
  MISC_FEATURE (16)..(20): Lactam ring between side chains at positions 16 and 20
XSQGTFTSDYSKYLDERAAKDFVQWLMDT

SEQ ID NO: 396 - protein, 29 aa, Artificial Sequence
  Synthetic peptide
  MISC_FEATURE: c-term amidation
  MOD_RES (1)..(1): (Des-amino)His
  MISC_FEATURE (12)..(16): Lactam ring between side chains at positions 12 and 16
XSQGTFTSDYSKYLDERAAQDFVQWLMDT

SEQ ID NO: 397 - protein, 29 aa, Artificial Sequence
  Synthetic peptide
  MISC_FEATURE: c-term amidation
  MOD_RES (1)..(1): (Des-amino)His
  MISC_FEATURE (12)..(16): Lactam ring between side chains at positions 12 and 16
XSQGTFTSDYSKYLDERAAKDFVQWLMDT

SEQ ID NO: 398 - protein, 29 aa, Artificial Sequence
  Synthetic peptide
  MISC_FEATURE: c-term amidation
  MOD_RES (1)..(1): (Des-amino)His
  MISC_FEATURE (16)..(20): Lactam ring between side chains at positions 16 and 20
XSQGTFTSDYSKYLDKRAAEDFVQWLMDT

SEQ ID NO: 399 - protein, 29 aa, Artificial Sequence
  Synthetic peptide
  MISC_FEATURE: c-term amidation
  MOD_RES (1)..(1): (Des-amino)His
XSQGTFTSDYSKYLDEQAAKEFIAWLMDT

SEQ ID NO: 400 - protein, 29 aa, Artificial Sequence
  Synthetic peptide
  MISC_FEATURE: c-term amidation
  MOD_RES (1)..(1): (Des-amino)His
  MISC_FEATURE (12)..(16): Lactam ring between side chains at positions 12 and 16
XSQGTFTSDYSKYLDEQAAKEFIAWLMDT

SEQ ID NO: 401 - protein, 29 aa, Artificial Sequence
  Synthetic peptide
  MISC_FEATURE: c-term amidation
  MOD_RES (1)..(1): (Des-amino)His
  MISC_FEATURE (16)..(20): Lactam ring between side chains at positions 16 and 20
XSQGTFTSDYSKYLDEQAAKEFIAWLMDT

SEQ ID NO: 402 - protein, 29 aa, Artificial Sequence
  Synthetic peptide
  MISC_FEATURE: c-term amidation
  MOD_RES (2)..(2): Aminoisobutyric acid
HXQGTFTSDYSKYLDERRAQDFVQWLMDT

SEQ ID NO: 403 - protein, 29 aa, Artificial Sequence
  Synthetic peptide
  MISC_FEATURE: c-term amidation
  MOD_RES (2)..(2): Aminoisobutyric acid
HXQGTFTSDYSKYLDERRAKDFVQWLMDT

SEQ ID NO: 404 - protein, 29 aa, Artificial Sequence
  Synthetic peptide
  MISC_FEATURE: c-term amidation
  MOD_RES (2)..(2): Aminoisobutyric acid
  MISC_FEATURE (16)..(20): Lactam ring between side chains at positions 16 and 20
HXQGTFTSDYSKYLDERRAKDFVQWLMDT

SEQ ID NO: 405 - protein, 29 aa, Artificial Sequence
  Synthetic peptide
  MISC_FEATURE: c-term amidation
  MOD_RES (2)..(2): aminoisobutyric acid
  MISC_FEATURE (12)..(16): Lactam ring between side chains at positions 12 and 16
HXQGTFTSDYSKYLDERRAQDFVQWLMDT

SEQ ID NO: 406 - protein, 29 aa, Artificial Sequence
  Synthetic peptide
  MISC_FEATURE: c-term amidation
  MOD_RES (2)..(2): Aminoisobutyric acid
  MISC_FEATURE (12)..(16): Lactam ring between side chains at positions 12 and 16
HXQGTFTSDYSKYLDERRAKDFVQWLMDT

SEQ ID NO: 407 - protein, 29 aa, Artificial Sequence
  Synthetic peptide
  MISC_FEATURE: c-term amidation
  MOD_RES (2)..(2): Aminoisobutyric acid
  MISC_FEATURE (16)..(20): Lactam ring between side chains at positions 16 and 20
HXQGTFTSDYSKYLDKRRAEDFVQWLMDT

SEQ ID NO: 408 - protein, 29 aa, Artificial Sequence
  Synthetic peptide
  MOD_RES (2)..(2): Aminoisobutyric acid
  MISC_FEATURE (2)..(2): c-term amidation
HXQGTFTSDYSKYLDERAAKDFVQWLMDT

SEQ ID NO: 409 - protein, 29 aa, Artificial Sequence
  Synthetic peptide
  MISC_FEATURE: c-term amidation
  MOD_RES (2)..(2): Aminoisobutyric acid
  MISC_FEATURE (16)..(20): Lactam ring between side chains at positions 16 and 20
HXQGTFTSDYSKYLDERAAKDFVQWLMDT

SEQ ID NO: 410 - protein, 29 aa, Artificial Sequence
  Synthetic peptide
  MISC_FEATURE: c-term amidation
  MOD_RES (2)..(2): Aminoisobutyric acid
  MISC_FEATURE (12)..(16): Lactam ring between side chains at positions 12 and 16
HXQGTFTSDYSKYLDERAAQDFVQWLMDT

SEQ ID NO: 411 - protein, 29 aa, Artificial Sequence
  Synthetic peptide
  MISC_FEATURE: c-term amidation
  MOD_RES (2)..(2): Aminoisobutyric acid
  MISC_FEATURE (12)..(16): Lactam ring between side chains at positions 12 and 16
HXQGTFTSDYSKYLDERAAKDFVQWLMDT

SEQ ID NO: 412 - protein, 29 aa, Artificial Sequence
  Synthetic peptide
  MISC_FEATURE: c-term amidation
  MOD_RES (2)..(2): Aminoisobutyric acid
  MISC_FEATURE (12)..(16): Lactam ring between side chains at positions 16 and 20
HXQGTFTSDYSKYLDKRAAEDFVQWLMDT

SEQ ID NO: 413 - protein, 29 aa, Artificial Sequence
  Synthetic peptide
  MISC_FEATURE: c-term amidation
  MOD_RES (2)..(2): Aminoisobutyric acid
HXQGTFTSDYSKYLDEQAAKEFIAWLMDT

SEQ ID NO: 414 - protein, 29 aa, Artificial Sequence
  Synthetic peptide
  MISC_FEATURE: c-term amidation
  MOD_RES (2)..(2): Aminoisobutyric acid
  MISC_FEATURE (12)..(16): Lactam ring between side chains at positions 12 and 16
HXQGTFTSDYSKYLDEQAAKEFIAWLMDT

SEQ ID NO: 415 - protein, 29 aa, Artificial Sequence
  Synthetic peptide
  MISC_FEATURE: c-term amidation
  MOD_RES (2)..(2): Aminoisobutyric acid
  MISC_FEATURE (16)..(20): Lactam ring between side chains at positions 16 and 20
HXQGTFTSDYSKYLDEQAAKEFIAWLMDT

SEQ ID NO: 416 - protein, 29 aa, Artificial Sequence
  Synthetic peptide
  MISC_FEATURE: c-term amidation
  MOD_RES (2)..(2): D-Ala
HXQGTFTSDYSKYLDERRAQDFVQWLMDT

SEQ ID NO: 417 - protein, 29 aa, Artificial Sequence
  Synthetic peptide
  MISC_FEATURE: c-term amidation
  MOD_RES (2)..(2): D-Ala
HXQGTFTSDYSKYLDERRAKDFVQWLMDT

SEQ ID NO: 418 - protein, 29 aa, Artificial Sequence
  Synthetic peptide
  MISC_FEATURE: c-term amidation
  MOD_RES (2)..(2): D-Ala
  MISC_FEATURE (16)..(20): Lactam ring between side chains at positions 16 and 20
HXQGTFTSDYSKYLDERRAKDFVQWLMDT

SEQ ID NO: 419 - protein, 29 aa, Artificial Sequence
  Synthetic peptide
  MISC_FEATURE: c-term amidation
  MOD_RES (2)..(2): D-Ala
  MISC_FEATURE (12)..(16): Lactam ring between side chains at positions 12 and 16
HXQGTFTSDYSKYLDERRAQDFVQWLMDT

SEQ ID NO: 420 - protein, 29 aa, Artificial Sequence
  Synthetic peptide
  MISC_FEATURE: c-term amidation
  MOD_RES (2)..(2): D-Ala
  MISC_FEATURE (12)..(16): Lactam ring between side chains at positions 12 and 16
HXQGTFTSDYSKYLDERRAKDFVQWLMDT

SEQ ID NO: 421 - protein, 29 aa, Artificial Sequence
  Synthetic peptide
  MISC_FEATURE: c-term amidation
  MOD_RES (2)..(2): D-Ala
  MISC_FEATURE (16)..(20): Lactam ring between side chains at positions 16 and 20
HXQGTFTSDYSKYLDKRRAEDFVQWLMDT

SEQ ID NO: 422 - protein, 29 aa, Artificial Sequence
  Synthetic peptide
  MISC_FEATURE: c-term amidation
  MOD_RES (2)..(2): D-Ala
HXQGTFTSDYSKYLDERAAKDFVQWLMDT

SEQ ID NO: 423 - protein, 29 aa, Artificial Sequence
  Synthetic peptide
  MISC_FEATURE: c-term amidation
  MOD_RES (2)..(2): D-Ala
  MISC_FEATURE (16)..(20): Lactam ring between side chains at positions 16 and 20
HXQGTFTSDYSKYLDERAAKDFVQWLMDT

SEQ ID NO: 424 - protein, 29 aa, Artificial Sequence
  Synthetic peptide
  MISC_FEATURE: c-term amidation
  MOD_RES (2)..(2): D-Ala
  MISC_FEATURE (12)..(16): Lactam ring between side chains at positions 12 and 16
HXQGTFTSDYSKYLDERAAQDFVQWLMDT

SEQ ID NO: 425 - protein, 29 aa, Artificial Sequence
  Synthetic peptide
  MISC_FEATURE: c-term amidation
  MOD_RES (2)..(2): D-Ala
  MISC_FEATURE (12)..(16): Lactam ring between side chains at positions 12 and 16
HXQGTFTSDYSKYLDERAAKDFVQWLMDT

SEQ ID NO: 426 - protein, 29 aa, Artificial Sequence
  Synthetic peptide
  MISC_FEATURE: c-term amidation
  MOD_RES (2)..(2): D-Ala
  MISC_FEATURE (16)..(20): Lactam ring between side chains at positions 16 and 20
HXQGTFTSDYSKYLDKRAAEDFVQWLMDT

SEQ ID NO: 427 - protein, 29 aa, Artificial Sequence
  Synthetic peptide
  MISC_FEATURE: c-term amidation
  MOD_RES (2)..(2): D-Ala
HXQGTFTSDYSKYLDEQAAKEFIAWLMDT

SEQ ID NO: 428 - protein, 29 aa, Artificial Sequence
  Synthetic peptide
  MISC_FEATURE: c-term amidation
  MOD_RES (2)..(2): D-Ala
  MISC_FEATURE (12)..(16): Lactam ring between side chains at positions 12 and 16
HXQGTFTSDYSKYLDEQAAKEFIAWLMDT

SEQ ID NO: 429 - protein, 29 aa, Artificial Sequence
  Synthetic peptide
  MISC_FEATURE: c-term amidation
  MOD_RES (2)..(2): D-Ala
  MISC_FEATURE (16)..(20): Lactam ring between side chains at positions 16 and 20
HXQGTFTSDYSKYLDEQAAKEFIAWLMDT

SEQ ID NO: 430 - protein, 29 aa, Artificial Sequence
  Synthetic peptide
  MISC_FEATURE: c-term amidation
HSEGTFTSDYSKYLDERRAQDFVQWLMDT

SEQ ID NO: 431 - protein, 29 aa, Artificial Sequence
  Synthetic peptide
  MISC_FEATURE: c-term amidation
HSEGTFTSDYSKYLDERRAKDFVQWLMDT

SEQ ID NO: 432 - protein, 29 aa, Artificial Sequence
  Synthetic peptide
  MISC_FEATURE: c-term amidation
  MISC_FEATURE (16)..(20): Lactam ring between side chains at positions 16 and 20
HSEGTFTSDYSKYLDERRAKDFVQWLMDT

SEQ ID NO: 433 - protein, 29 aa, Artificial Sequence
  Synthetic peptide
  MISC_FEATURE: c-term amidation
  MISC_FEATURE (16)..(16): Lactam ring between side chains at positions 12 and 16
HSEGTFTSDYSKYLDERRAQDFVQWLMDT

SEQ ID NO: 434 - protein, 29 aa, Artificial Sequence
  Synthetic peptide
  MISC_FEATURE: c-term amidation
  MISC_FEATURE (12)..(16): Lactam ring between side chains at positions 12 and 16
HSEGTFTSDYSKYLDERRAKDFVQWLMDT

SEQ ID NO: 435 - protein, 29 aa, Artificial Sequence
  Synthetic peptide
  MISC_FEATURE: c-term amidation
  MISC_FEATURE (16)..(20): Lactam ring between side chains at positions 16 and 20
HSEGTFTSDYSKYLDKRRAEDFVQWLMDT

SEQ ID NO: 436 - protein, 29 aa, Artificial Sequence
  Synthetic peptide
  MISC_FEATURE: c-term amidation
HSEGTFTSDYSKYLDERAAKDFVQWLMDT

SEQ ID NO: 437 - protein, 29 aa, Artificial Sequence
  Synthetic peptide
  MISC_FEATURE: c-term amidation
  MISC_FEATURE: Lactam ring between side chains at positions 16 and 20
HSEGTFTSDYSKYLDERAAKDFVQWLMDT

SEQ ID NO: 438 - protein, 29 aa, Artificial Sequence
  Synthetic peptide
  MISC_FEATURE: c-term amidation
  MISC_FEATURE (12)..(16): Lactam ring between side chains at positions 12 and 16
HSEGTFTSDYSKYLDERAAQDFVQWLMDT

SEQ ID NO: 439 - protein, 29 aa, Artificial Sequence
  Synthetic peptide
  MISC_FEATURE: c-term amidation
  MISC_FEATURE (12)..(16): Lactam ring between side chains at positions 12 and 16
HSEGTFTSDYSKYLDERAAKDFVQWLMDT

SEQ ID NO: 440 - protein, 29 aa, Artificial Sequence
  Synthetic peptide
  MISC_FEATURE: c-term amidation
  MISC_FEATURE (16)..(20): Lactam ring between side chains at positions 16 and 20
HSEGTFTSDYSKYLDKRAAEDFVQWLMDT

SEQ ID NO: 441 - protein, 29 aa, Artificial Sequence
  Synthetic peptide
  MISC_FEATURE: c-term amidation
HSEGTFTSDYSKYLDEQAAKEFIAWLMDT

SEQ ID NO: 442 - protein, 29 aa, Artificial Sequence
  Synthetic peptide
  MISC_FEATURE: c-term amidation
  MISC_FEATURE (12)..(16): Lactam ring between side chains at positions 12 and 16
HSEGTFTSDYSKYLDEQAAKEFIAWLMDT

SEQ ID NO: 443 - protein, 29 aa, Artificial Sequence
  Synthetic peptide
  MISC_FEATURE: c-term amidation
  MISC_FEATURE (16)..(20): Lactam ring between side chains at positions 16 and 20
HSEGTFTSDYSKYLDEQAAKEFIAWLMDT

SEQ ID NO: 444 - protein, 29 aa, Artificial Sequence
  Synthetic peptide
  MISC_FEATURE: c-term amidation
  MOD_RES (1)..(1): (Des-amino)His
XSEGTFTSDYSKYLDERRAQDFVQWLMDT

SEQ ID NO: 445 - protein, 29 aa, Artificial Sequence
  Synthetic peptide
  MISC_FEATURE: c-term amidation
  MOD_RES (1)..(1): (Des-amino)His
XSEGTFTSDYSKYLDERRAKDFVQWLMDT

SEQ ID NO: 446 - protein, 29 aa, Artificial Sequence
  Synthetic peptide
  MISC_FEATURE: c-term amidation
  MOD_RES (1)..(1): (Des-amino)His
  MISC_FEATURE (16)..(20): Lactam ring between side chains at positions 16 and 20
XSEGTFTSDYSKYLDERRAKDFVQWLMDT

SEQ ID NO: 447 - protein, 29 aa, Artificial Sequence
  Synthetic peptide
  MISC_FEATURE: c-term amidation
  MISC_FEATURE: Lactam ring between side chains at positions 12 and 16
  MOD_RES (1)..(1): (Des-amino)His
XSEGTFTSDYSKYLDERRAQDFVQWLMDT

SEQ ID NO: 448 - protein, 29 aa, Artificial Sequence
  Synthetic peptide
  MISC_FEATURE: c-term amidation
  MOD_RES (1)..(1): (Des-amino)His
  MISC_FEATURE (12)..(16): Lactam ring between side chains at positions 12 and 16
XSEGTFTSDYSKYLDERRAKDFVQWLMDT

SEQ ID NO: 449 - protein, 29 aa, Artificial Sequence
  Synthetic peptide
  MISC_FEATURE: c-term amidation
  MOD_RES (1)..(1): (Des-amino)His
  MISC_FEATURE (16)..(20): Lactam ring between side chains at positions 16 and 20
XSEGTFTSDYSKYLDKRRAEDFVQWLMDT

SEQ ID NO: 450 - protein, 29 aa, Artificial Sequence
  Synthetic peptide
  MISC_FEATURE: c-term amidation
  MOD_RES (1)..(1): (Des-amino)His
XSEGTFTSDYSKYLDERAAKDFVQWLMDT

SEQ ID NO: 451 - protein, 29 aa, Artificial Sequence
  Synthetic peptide
  MISC_FEATURE: c-term amidation
  MOD_RES (1)..(1): (Des-amino)His
  MISC_FEATURE (16)..(20): Lactam ring between side chains at positions 16 and 20
XSEGTFTSDYSKYLDERAAKDFVQWLMDT

SEQ ID NO: 452 - protein, 29 aa, Artificial Sequence
  Synthetic peptide
  MISC_FEATURE: C-term amidation
  MOD_RES (1)..(1): (Des-amino)His
  MISC_FEATURE (12)..(16): Lactam ring between side chains at positions 12 and 16
XSEGTFTSDYSKYLDERAAQDFVQWLMDT

SEQ ID NO: 453 - protein, 29 aa, Artificial Sequence
  Synthetic peptide
  MISC_FEATURE: c-term amidation
  MOD_RES (1)..(1): (Des-amino)His
  MISC_FEATURE (12)..(16): Lactam ring between side chains at positions 12 and 16
XSEGTFTSDYSKYLDERAAKDFVQWLMDT

SEQ ID NO: 454 - protein, 29 aa, Artificial Sequence
  Synthetic peptide
  MISC_FEATURE: c-term amidation
  MOD_RES (1)..(1): (Des-amino)His
  MISC_FEATURE (16)..(20): Lactam ring between side chains at positions 16 and 20
XSEGTFTSDYSKYLDKRAAEDFVQWLMDT

SEQ ID NO: 455 - protein, 29 aa, Artificial Sequence
  Synthetic peptide
  MISC_FEATURE: c-term amidation
  MOD_RES (1)..(1): (Des-amino)His
XSEGTFTSDYSKYLDEQAAKEFIAWLMDT

SEQ ID NO: 456 - protein, 29 aa, Artificial Sequence
  Synthetic peptide
  MISC_FEATURE: c-term amidation
  MOD_RES (1)..(1): (Des-amino)His
  MISC_FEATURE (12)..(16): Lactam ring between side chains at positions 12 and 16
XSEGTFTSDYSKYLDEQAAKEFIAWLMDT

SEQ ID NO: 457 - protein, 29 aa, Artificial Sequence
  Synthetic peptide
  MISC_FEATURE: c-term amidation
  MOD_RES (1)..(1): (Des-amino)His
  MISC_FEATURE (16)..(20): Lactam ring between side chains at positions 16 and 20
XSEGTFTSDYSKYLDEQAAKEFIAWLMDT

SEQ ID NO: 458 - protein, 29 aa, Artificial Sequence
  Synthetic peptide
  MISC_FEATURE: c-term amidation
  MOD_RES (2)..(2): Aminoisobutyric acid
HXEGTFTSDYSKYLDERRAQDFVQWLMDT

SEQ ID NO: 459 - protein, 29 aa, Artificial Sequence
  Synthetic peptide
  MISC_FEATURE: c-term amidation
  MOD_RES (2)..(2): Aminoisobutyric acid
HXEGTFTSDYSKYLDERRAKDFVQWLMDT

SEQ ID NO: 460 - protein, 29 aa, Artificial Sequence
  Synthetic peptide
  MISC_FEATURE: c-term amidation
  MOD_RES (2)..(2): Aminoisobutyric acid
  MISC_FEATURE (16)..(20): Lactam ring between side chains at positions 16 and 20
HXEGTFTSDYSKYLDERRAKDFVQWLMDT

SEQ ID NO: 461 - protein, 29 aa, Artificial Sequence
  Synthetic peptide
  MISC_FEATURE: c-term amidation
  MOD_RES (2)..(2): Aminoisobutyric acid
  MISC_FEATURE (12)..(16): Lactam ring between side chains at positions 12 and 16
HXEGTFTSDYSKYLDERRAQDFVQWLMDT

SEQ ID NO: 462 - protein, 29 aa, Artificial Sequence
  Synthetic peptide
  MISC_FEATURE: c-term amidation
  MOD_RES (2)..(2): Aminoisobutyric acid
  MISC_FEATURE (12)..(16): Lactam ring between side chains at positions 12 and 16
HXEGTFTSDYSKYLDERRAKDFVQWLMDT

SEQ ID NO: 463 - protein, 29 aa, Artificial Sequence
  Synthetic peptide
  MISC_FEATURE: c-term amidation
  MOD_RES (2)..(2): Aminoisobutyric acid
  MISC_FEATURE (16)..(20): Lactam ring between side chains at positions 16 and 20
HXEGTFTSDYSKYLDKRRAEDFVQWLMDT

SEQ ID NO: 464 - protein, 29 aa, Artificial Sequence
  Synthetic peptide
  MISC_FEATURE: c-term amidation
  MOD_RES (2)..(2): Aminoisobutyric acid
HXEGTFTSDYSKYLDERAAKDFVQWLMDT

SEQ ID NO: 465 - protein, 29 aa, Artificial Sequence
  Synthetic peptide
  MISC_FEATURE: c-term amidation
  MOD_RES (2)..(2): Aminoisobutyric acid
  MISC_FEATURE (16)..(20): Lactam ring between side chains at positions 16 and 20
HXEGTFTSDYSKYLDERAAKDFVQWLMDT

SEQ ID NO: 466 - protein, 29 aa, Artificial Sequence
  Synthetic peptide
  MISC_FEATURE: c-term amidation
  MOD_RES (2)..(2): Aminoisobutyric acid
  MISC_FEATURE (12)..(16): Lactam ring between side chains at postions 12 and 16
HXEGTFTSDYSKYLDERAAQDFVQWLMDT

SEQ ID NO: 467 - protein, 29 aa, Artificial Sequence
  Synthetic peptide
  MISC_FEATURE: c-term amidation
  MOD_RES (2)..(2): Aminoisobutyric acid
  MISC_FEATURE (12)..(16): Lactam ring between side chains at positions 12 and 16
HXEGTFTSDYSKYLDERAAKDFVQWLMDT

SEQ ID NO: 468 - protein, 29 aa, Artificial Sequence
  Synthetic peptide
  MISC_FEATURE: c-term amidation
  MOD_RES (2)..(2): Aminoisobutyric acid
  MISC_FEATURE (12)..(16): Lactam ring between side chains at positions 16 and 20
HXEGTFTSDYSKYLDKRAAEDFVQWLMDT

SEQ ID NO: 469 - protein, 29 aa, Artificial Sequence
  Synthetic peptide
  MISC_FEATURE: c-term amidation
  MOD_RES (2)..(2): Aminoisobutyric acid
HXEGTFTSDYSKYLDEQAAKEFIAWLMDT

SEQ ID NO: 470 - protein, 29 aa, Artificial Sequence
  Synthetic peptide
  MISC_FEATURE: c-term amidation
  MOD_RES (2)..(2): Aminoisobutyric acid
  MISC_FEATURE (12)..(16): Lactam ring between side chains at positions 12 and 16
HXEGTFTSDYSKYLDEQAAKEFIAWLMDT

SEQ ID NO: 471 - protein, 29 aa, Artificial Sequence
  Synthetic peptide
  MISC_FEATURE: c-term amidation
  MOD_RES (2)..(2): Aminoisobutyric acid
  MISC_FEATURE (16)..(20): Lactam ring between side chains at positions 16 and 20
HXEGTFTSDYSKYLDEQAAKEFIAWLMDT

SEQ ID NO: 472 - protein, 29 aa, Artificial Sequence
  Synthetic peptide
  MISC_FEATURE: c-term amidation
  MOD_RES (2)..(2): D-Ala
HXEGTFTSDYSKYLDERRAQDFVQWLMDT

SEQ ID NO: 473 - protein, 29 aa, Artificial Sequence
  Synthetic peptide
  MISC_FEATURE: c-term amidation
  MOD_RES (2)..(2): D-Ala
HXEGTFTSDYSKYLDERRAKDFVQWLMDT

SEQ ID NO: 474 - protein, 29 aa, Artificial Sequence
  Synthetic peptide
  MISC_FEATURE: c-term amidation
  MOD_RES (2)..(2): D-Ala
  MISC_FEATURE (16)..(20): Lactam ring between side chains at positions 16 and 20
HXEGTFTSDYSKYLDERRAKDFVQWLMDT

SEQ ID NO: 475 - protein, 29 aa, Artificial Sequence
  Synthetic peptide
  MISC_FEATURE: c-term amidation
  MOD_RES (2)..(2): D-Ala
  MISC_FEATURE (12)..(16): Lactam ring between side chains at positions 12 and 16
HXEGTFTSDYSKYLDERRAQDFVQWLMDT

SEQ ID NO: 476 - protein, 29 aa, Artificial Sequence
  Synthetic peptide
  MISC_FEATURE: c-term amidation
  MOD_RES (2)..(2): D-Ala
  MISC_FEATURE (12)..(16): Lactam ring between side chains at positions 12 and 16
HXEGTFTSDYSKYLDERRAKDFVQWLMDT

SEQ ID NO: 477 - protein, 29 aa, Artificial Sequence
  Synthetic peptide
  MISC_FEATURE: c-term amidation
  MOD_RES (2)..(2): D-Ala
  MISC_FEATURE (16)..(20): Lactam ring between side chains at positions 16 and 20
HXEGTFTSDYSKYLDKRRAEDFVQWLMDT

SEQ ID NO: 478 - protein, 29 aa, Artificial Sequence
  Synthetic peptide
  MISC_FEATURE: c-term amidation
  MOD_RES (2)..(2): D-Ala
HXEGTFTSDYSKYLDERAAKDFVQWLMDT

SEQ ID NO: 479 - protein, 29 aa, Artificial Sequence
  Synthetic peptide
  MISC_FEATURE: c-term amidation
  MOD_RES (2)..(2): D-Ala
  MISC_FEATURE (16)..(20): Lactam ring between side chains at positions 16 and 20
HXEGTFTSDYSKYLDERAAKDFVQWLMDT

SEQ ID NO: 480 - protein, 29 aa, Artificial Sequence
  Synthetic peptide
  MISC_FEATURE: c-term amidation
  MOD_RES (2)..(2): D-Ala
  MISC_FEATURE (12)..(16): Lactam ring between side chains at positions 12 and 16
HXEGTFTSDYSKYLDERAAQDFVQWLMDT

SEQ ID NO: 481 - protein, 29 aa, Artificial Sequence
  Synthetic peptide
  MISC_FEATURE: c-term amidation
  MOD_RES (2)..(2): D-Ala
  MISC_FEATURE (12)..(16): Lactam ring between side chains at positions 12 and 16
HXEGTFTSDYSKYLDERAAKDFVQWLMDT

SEQ ID NO: 482 - protein, 29 aa, Artificial Sequence
  Synthetic peptide
  MISC_FEATURE: c-term amidation
  MOD_RES (2)..(2): D-Ala
  MISC_FEATURE (16)..(20): Lactam ring between side chains at positions 16 and 20
HXEGTFTSDYSKYLDKRAAEDFVQWLMDT

SEQ ID NO: 483 - protein, 29 aa, Artificial Sequence
  Synthetic peptide
  MISC_FEATURE: c-term amidation
  MOD_RES (2)..(2): D-Ala
HXEGTFTSDYSKYLDEQAAKEFIAWLMDT

SEQ ID NO: 484 - protein, 29 aa, Artificial Sequence
  Synthetic peptide
  MISC_FEATURE: c-term amidation
  MOD_RES (2)..(2): D-Ala
  MISC_FEATURE (12)..(16): Lactam ring between side chains at positions 12 and 16
HXEGTFTSDYSKYLDEQAAKEFIAWLMDT

SEQ ID NO: 485 - protein, 29 aa, Artificial Sequence
  Synthetic peptide
  MISC_FEATURE: c-term amidation
  MOD_RES (2)..(2): D-Ala
  MISC_FEATURE (16)..(20): Lactam ring between side chains at positions 16 and 20
HXEGTFTSDYSKYLDEQAAKEFIAWLMDT

SEQ ID NO: 486 - protein, 29 aa, Artificial Sequence
  Synthetic peptide
  MISC_FEATURE: c-term amidation
  MOD_RES (2)..(2): Aminoisobutyric acid
  MOD_RES (24)..(24): Cys-PEG
HXQGTFTSDYSKYLDEQAAKEFICWLMNT

SEQ ID NO: 487 - protein, 29 aa, Artificial Sequence
  Synthetic peptide
  MISC_FEATURE: c-term amidation
  MOD_RES (2)..(2): Aminoisobutyric acid
  MOD_RES (29)..(29): Cys-PEG
HXQGTFTSDYSKYLDEQAAKEFIAWLMNC

SEQ ID NO: 488 - protein, 40 aa, Artificial Sequence
  Synthetic peptide
  MISC_FEATURE: c-term amidation
  MOD_RES (2)..(2): Aminoisobutyric acid
  MOD_RES (40)..(40): Cys-PEG
HXQGTFTSDYSKYLDEQAAKEFIAWLMNGGPSSGAPPPSC

SEQ ID NO: 489 - protein, 40 aa, Artificial Sequence; identical to SEQ ID NO: 488
  Synthetic peptide
  MISC_FEATURE: c-term amidation
  MOD_RES (2)..(2): Aminoisobutyric acid
  MISC_FEATURE (16)..(20): Lactam ring between side chains at positions 16 and 20
  MOD_RES (40)..(40): Cys-PEG

SEQ ID NO: 490 - protein, 39 aa, Artificial Sequence
  Synthetic peptide
  MISC_FEATURE: c-term amidation
  MOD_RES (2)..(2): Aminoisobutyric acid
  MOD_RES (24)..(24): Cys-PEG
HXQGTFTSDYSKYLDEQAAKEFICWLMNGGPSSGAPPPS

SEQ ID NO: 491 - protein, 39 aa, Artificial Sequence; identical to SEQ ID NO: 490
  Synthetic peptide
  MISC_FEATURE: c-term amidation
  MOD_RES (2)..(2): Aminoisobutyric acid
  MISC_FEATURE (16)..(20): Lactam ring between side chains at positions 16 and 20
  MOD_RES (24)..(24): Cys-PEG

SEQ ID NO: 492 - protein, 29 aa, Artificial Sequence
  Synthetic peptide
  MISC_FEATURE: c-term amidation
  MOD_RES (2)..(2): Aminoisobutyric acid
  MOD_RES (24)..(24): Cys-PEG
HXQGTFTSDYSKYLDERAAKDFVCWLMNT

SEQ ID NO: 493 - protein, 29 aa, Artificial Sequence
  Synthetic peptide
  MISC_FEATURE: c-term amidation
  MOD_RES (2)..(2): Aminoisobutyric acid
  MOD_RES (24)..(24): Cys-PEG
HXQGTFTSDYSKYLDERAAKDFVQWLMNC

SEQ ID NO: 494 - protein, 40 aa, Artificial Sequence
  Synthetic peptide
  MISC_FEATURE: c-term amidation
  MOD_RES (2)..(2): Aminoisobutyric acid
  MOD_RES (24)..(24): Cys-PEG
HXQGTFTSDYSKYLDERAAKDFVQWLMNGGPSSGAPPPSC

SEQ ID NO: 495 - protein, 40 aa, Artificial Sequence; identical to SEQ ID NO: 494
  Synthetic peptide
  MISC_FEATURE: c-term amidation
  MOD_RES (2)..(2): Aminoisobutyric acid
  MISC_FEATURE (16)..(20): Lactam ring between side chains at positions 16 and 20
  MOD_RES (40)..(40): Cys-PEG

SEQ ID NO: 496 - protein, 39 aa, Artificial Sequence
  Synthetic peptide
  MISC_FEATURE: c-term amidation
  MOD_RES (2)..(2): Aminoisobutyric acid
  MOD_RES (24)..(24): Cys-PEG
HXQGTFTSDYSKYLDERAAKDFVCWLMNGGPSSGAPPPS

SEQ ID NO: 497 - protein, 39 aa, Artificial Sequence; identical to SEQ ID NO: 496
  Synthetic peptide
  MISC_FEATURE: c-term amidation
  MOD_RES (2)..(2): Aminoisobutyric acid
  MISC_FEATURE (16)..(20): Lactam ring between side chains at positions 16 and 20
  MOD_RES (24)..(24): Cys-PEG

SEQ ID NO: 498 - protein, 30 aa, Artificial Sequence
  Synthetic peptide
  MISC_FEATURE: c-term amidation
  MOD_RES (2)..(2): Aminoisobutyric acid
  MOD_RES (24)..(24): Cys-PEG
HXQGTFTSDYSKYLDERRAKDFVCWLMNTA

SEQ ID NO: 499 - protein, 29 aa, Artificial Sequence
  Synthetic peptide
  MISC_FEATURE: c-term amidation
  MOD_RES (2)..(2): Aminoisobutyric acid
  MOD_RES (24)..(24): Cys-PEG
HXQGTFTSDYSKYLDERRAKDFVQWLMNC

SEQ ID NO: 500 - protein, 40 aa, Artificial Sequence
  Synthetic peptide
  MISC_FEATURE: c-term amidation
  MOD_RES (2)..(2): Aminoisobutyric acid
  MOD_RES (40)..(40): Cys-PEG
HXQGTFTSDYSKYLDERRAKDFVQWLMNGGPSSGAPPPSC

SEQ ID NO: 501 - protein, 40 aa, Artificial Sequence; identical to SEQ ID NO: 500
  Synthetic peptide
  MISC_FEATURE: c-term amidation
  MOD_RES (2)..(2): Aminoisobutyric acid
  MISC_FEATURE (16)..(20): Lactam ring between side chains at positions 16 and 20
  MOD_RES (40)..(40): Cys-PEG

SEQ ID NO: 502 - protein, 39 aa, Artificial Sequence
  Synthetic peptide
  MISC_FEATURE: c-term amidation
  MOD_RES (2)..(2): Aminoisobutyric acid
  MOD_RES (24)..(24): Cys-PEG
HXQGTFTSDYSKYLDERRAKDFVCWLMNGGPSSGAPPPS

SEQ ID NO: 503 - protein, 39 aa, Artificial Sequence; identical to SEQ ID NO: 502
  Synthetic peptide
  MISC_FEATURE: c-term amidation
  MOD_RES (2)..(2): Aminoisobutyric acid
  MISC_FEATURE (16)..(20): Lactam ring between side chains at positions 16 and 20
  MOD_RES (24)..(24): Cys-PEG

SEQ ID NO: 504 - protein, 29 aa, Artificial Sequence
  Synthetic peptide
  MISC_FEATURE: c-term amidation
  MOD_RES (2)..(2): Aminoisobutyric acid
  MISC_FEATURE (16)..(20): Lactam ring between side chains at positions 16 and 20
  MOD_RES (24)..(24): Cys-PEG
HXQGTFTSDYSKYLDEQAAKEFICWLMNT

SEQ ID NO: 505 - protein, 29 aa, Artificial Sequence
  Synthetic peptide
  MISC_FEATURE: c-term amidation
  MOD_RES (1)..(1): Alpha, Alpha-Dimethyl Imidiazole Acetic Acid
  MISC_FEATURE (16)..(20): Lactam ring between side chains at positions 16 and 20
  MOD_RES (24)..(24): Cys-PEG
XSQGTFTSDYSKYLDEQAAKEFICWLMNT

SEQ ID NO: 506 - protein, 29 aa, Artificial Sequence
  Synthetic peptide
  MISC_FEATURE: c-term amidation
  MOD_RES (1)..(1): Alpha, Alpha-Dimethly Imidiazole Acetic Acid
  MOD_RES (1)..(1): Alpha, Alpha-Dimethly Imidiazole Acetic Acid
  MISC_FEATURE (16)..(20): Lactam ring between side chains at positions 16 and 20
  MOD_RES (29)..(29): Cys-PEG
XSQGTFTSDYSKYLDEQAAKEFIAWLMNC

SEQ ID NO: 507 - protein, 40 aa, Artificial Sequence
  Synthetic peptide
  MISC_FEATURE: c-term amidation
  MOD_RES (1)..(1): Alpha, Alpha Dimethyl Imidiazole Acetic Acid
  MISC_FEATURE (16)..(20): Lactam ring between side chains at positions 16 and 20
  MOD_RES (40)..(40): Cys-PEG
XSQGTFTSDYSKYLDEQAAKEFIAWLMNGGPSSGAPPPSC

SEQ ID NO: 508 - protein, 40 aa, Artificial Sequence
  Synthetic peptide
  MISC_FEATURE: c-term amidation
  MOD_RES (1)..(1): Alpha, Alpha Dimethyl Imidiazole Acetic Acid
  MISC_FEATURE (16)..(20): Lactam ring between side chains at positions 16 and 20
  MOD_RES (40)..(40): Cys-PEG
XSQGTFTSDYSKYLDERRAKDFVQWLMNGGPSSGAPPPSC

SEQ ID NO: 509 - protein, 39 aa, Artificial Sequence
  Synthetic peptide
  MISC_FEATURE: c-term amidation
  MOD_RES (1)..(1): Alpha, Alpha Dimethyl Imidiazole Acetic Acid
  MISC_FEATURE (16)..(20): Lactam ring between side chains at positions 16 and 20
  MOD_RES (24)..(24): Cys-PEG
XSQGTFTSDYSKYLDEQAAKEFICWLMNGGPSSGAPPPS

SEQ ID NO: 510 - protein, 29 aa, Artificial Sequence
  Synthetic peptide
  MISC_FEATURE: c-term amidation
  MOD_RES (1)..(1): Alpha, Alpha Dimethyl Imidiazole Acetic Acid
  misc_feature (2)..(2): Xaa can be any naturally occurring amino acid
  MISC_FEATURE (16)..(20): Lactam ring between side chains at positions 16 and 20
  MOD_RES (24)..(24): Cys-PEG
HXQGTFTSDYSKYLDERRAKDFVCWLMNT

SEQ ID NO: 511 - protein, 29 aa, Artificial Sequence
  Synthetic peptide
  MISC_FEATURE: c-term amidation
  MOD_RES (2)..(2): Alpha, Alpha Dimethyl Imidiazole Acetic Acid
  MISC_FEATURE (16)..(20): Lactam ring between side chains at positions 16 and 20
  MOD_RES (24)..(24): Cys-PEG
HXQGTFTSDYSKYLDERRAKDFVCWLMNT

SEQ ID NO: 512 - protein, 29 aa, Artificial Sequence
  Synthetic peptide
  MISC_FEATURE: c-term amidation
  MOD_RES (1)..(1): Alpha, Alpha Dimethyl Imidiazole Acetic Acid
  MISC_FEATURE (16)..(20): Lactam ring between side chains at positions 16 and 20
  MOD_RES (29)..(29): Cys-PEG
XSQGTFTSDYSKYLDERRAKDFVQWLMNC

SEQ ID NO: 513 - protein, 39 aa, Artificial Sequence
  Synthetic peptide
  MISC_FEATURE: c-term amidation
  MOD_RES (1)..(1): Alpha, Alpha Dimethyl Imidiazole Acetic Acid
  MISC_FEATURE (16)..(20): Lactam ring between side chains at positions 16 and 20
  MOD_RES (24)..(24): Cys-PEG
XSQGTFTSDYSKYLDERRAKDFVCWLMNGGPSSGAPPPS

SEQ ID NO: 514 - protein, 29 aa, Artificial Sequence
  Synthetic peptide
  MISC_FEATURE: c-term amidation
  MISC_FEATURE (16)..(20): Lactam ring between side chains at positions 16 and 20
  MOD_RES (24)..(24): Cys-PEG
HSQGTFTSDYSKYLDEQAAKEFICWLMNT

SEQ ID NO: 515 - protein, 11 aa, Artificial Sequence
  Synthetic peptide
GGPSSGAPPPS

SEQ ID NO: 516 - protein, 12 aa, Artificial Sequence
  Synthetic peptide
  MOD_RES (12)..(12): Cys-PEG
GGPSSGAPPPSC

SEQ ID NO: 517 - protein, 29 aa, Artificial Sequence
  Synthetic peptide
  MISC_FEATURE: c-term amidation
  MOD_RES (2)..(2): Aminoisobutyric acid
  MISC_FEATURE (16)..(20): Lactam ring between side chains at positions 16 and 20
  MOD_RES (24)..(24): Cys-PEG
HXQGTFTSDYSKYLDERRAKDFVCWLMNT

SEQ ID NO: 518 - protein, 29 aa, Artificial Sequence
  Synthetic peptide
  MISC_FEATURE: c-term amidation
  MOD_RES (24)..(24): Cys-PEG
HSQGTFTSDYSKYLDEQAAKEFICWLMNT

SEQ ID NO: 519 - protein, 29 aa, Artificial Sequence
  Synthetic peptide
  MISC_FEATURE: c-term amidation
  MOD_RES (1)..(1): Alpha, Alpha Dimethly Imidiazole Acetic Acid
  MOD_RES (24)..(24): Cys-PEG
XSQGTFTSDYSKYLDEQAAKEFICWLMNT

SEQ ID NO: 520 - protein, 29 aa, Artificial Sequence
  Synthetic peptide
  MISC_FEATURE: c-term amidation
  MOD_RES (1)..(1): Alpha, Alpha Dimethyl Imidiazole Acetic Acid
  MOD_RES (29)..(29): Cys-PEG
XSQGTFTSDYSKYLDEQAAKEFIAWLMNC

SEQ ID NO: 521 - protein, 39 aa, Artificial Sequence
  Synthetic peptide
  MISC_FEATURE: c-term amidation
HSQGTFTSDYSKYLDSRRAQDFVQWLMNTGPSSGAPPPS

SEQ ID NO: 522 - protein, 39 aa, Artificial Sequence
  Synthetic peptide
  MISC_FEATURE: c-term amidation
HSQGTFTSDYSKYLDSRRAQDFVQWLMNGGPSSGAPPPS

SEQ ID NO: 523 - protein, 39 aa, Artificial Sequence
  Synthetic peptide
  MISC_FEATURE: c-term amidation
HSQGTFTSDYSKYLDSRRAQDFVQWLMKGGPSSGAPPPS

SEQ ID NO: 524 - protein, 39 aa, Artificial Sequence
  Synthetic peptide
  MISC_FEATURE: c-term amidation
HSQGTFTSDYSKYLDSRRAQDFVQWLVKGGPSSGAPPPS

SEQ ID NO: 525 - protein, 39 aa, Artificial Sequence
  Synthetic peptide
  MISC_FEATURE: c-term amidation
HSQGTFTSDYSKYLDSRRAQDFVQWLMDGGPSSGAPPPS

SEQ ID NO: 526 - protein, 39 aa, Artificial Sequence
  Synthetic peptide
  MISC_FEATURE: c-term amidation
HSQGTFTSDYSKYLDERRAKDFVQWLMDGGPSSGAPPPS

SEQ ID NO: 527 - protein, 30 aa, Artificial Sequence
  Synthetic peptide
  MISC_FEATURE: c-term amidation
HAEGTFTSDVSSYLEGQAAKEFIAWLVKGG

SEQ ID NO: 528 - protein, 29 aa, Artificial Sequence
  Synthetic peptide
  MISC_FEATURE: c-term amidation
  MOD_RES (2)..(2): Aminoisobutyric acid
  MISC_FEATURE (16)..(20): Lactam ring between side chains at positions 16 and 20
  MOD_RES (24)..(24): Cys-PEG
HXQGTFTSDYSKYLDERRAKDFVCWLMNT

SEQ ID NO: 529 - protein, 39 aa, Artificial Sequence; identical to SEQ ID NO: 513
  Synthetic peptide
  MISC_FEATURE: c-term amidation
  MOD_RES (1)..(1): Alpha, Alpha Dimethyl Imidiazole Acetic Acid
  MOD_RES (24)..(24): Cys-PEG

SEQ ID NO: 530 - protein, 29 aa, Artificial Sequence
  Synthetic peptide
  MISC_FEATURE: c-term amidation
  MOD_RES (1)..(1): Alpha, Alpha Dimethyl Imidiazole Acetic Acid
  MOD_RES (24)..(24): Cys-PEG
XSQGTFTSDYSKYLDERRAKDFVCWLMNT

SEQ ID NO: 531 - protein, 40 aa, Artificial Sequence
  Synthetic peptide
  MISC_FEATURE: c-term amidation
  MOD_RES (2)..(2): Aminoisobutyric acid
  MOD_RES (24)..(24): Cys-PEG
  MOD_RES (40)..(40): Cys-PEG
HXQGTFTSDYSKYLDERRAKEFICWLMNGGPSSGAPPPSC

SEQ ID NO: 532 - protein, 41 aa, Artificial Sequence
  Synthetic peptide
  MISC_FEATURE: c-term amidation
  MOD_RES (2)..(2): Aminoisobutyric acid
  MOD_RES (40)..(40): Cys-PEG
  MOD_RES (41)..(41): Cys-PEG
HXQGTFTSDYSKYLDEQAAKEFIAWLMNGGPSSGAPPPSCC

SEQ ID NO: 533 - protein, 39 aa, Artificial Sequence; identical to SEQ ID NO: 490
  Synthetic peptide
  MOD_RES (2)..(2): Aminoisobutyric acid
  MOD_RES (24)..(24): Cys-PEG
  MISC_FEATURE (24)..(24): c-term amidation

SEQ ID NO: 534 - protein, 29 aa, Artificial Sequence
  Synthetic peptide
  MISC_FEATURE: Chimera 2 AIB2 K10-C8 Cys 24-40K
  MISC_FEATURE: c-term amidation
  MOD_RES (2)..(2): Aminoisobutyric acid
  MOD_RES (10)..(10): Acylated with C8 fatty acid
  MOD_RES (24)..(24): Cys-PEG
HXQGTFTSDKSKYLDEQAAKEFICWLMNT

SEQ ID NO: 535 - protein, 29 aa, Artificial Sequence
  Synthetic peptide
  MISC_FEATURE: Chimera 2 AIB2 K10-C14 Cys 24-40K
  MISC_FEATURE: c-term amidation
  MOD_RES (2)..(2): Aminoisobutyric acid
  MOD_RES (10)..(10): Acylated with C14 fatty acid
  MOD_RES (24)..(24): Cys-PEG
HXQGTFTSDKSKYLDEQAAKEFICWLMNT

SEQ ID NO: 536 - protein, 29 aa, Artificial Sequence
  Synthetic peptide
  MISC_FEATURE: Chimera 2 AIB2 K10-C16 Cys24-40K
  MISC_FEATURE: c-term amidation
  MOD_RES (2)..(2): Aminoisobutyric acid
  MOD_RES (10)..(10): Acylated with C16 fatty acid
  MOD_RES (24)..(24): Cys-PEG
HXQGTFTSDKSKYLDEQAAKEFICWLMNT

SEQ ID NO: 537 - protein, 29 aa, Artificial Sequence
  Synthetic peptide
  MISC_FEATURE: Chimera 2 AIB2 K10-C18 Cys24-40K
  MISC_FEATURE: c-term amidation
  MOD_RES (2)..(2): Aminoisobutyric acid
  MOD_RES (10)..(10): Acylated with C18 fatty acid
  MOD_RES (24)..(24): Cys-PEG
HXQGTFTSDKSKYLDEQAAKEFICWLMNT

SEQ ID NO: 538 - protein, 29 aa, Artificial Sequence
  Synthetic peptide
  MISC_FEATURE: Chimera 2 K10-C18 Cys24-40K
  MISC_FEATURE: c-term amidation
  MOD_RES (10)..(10): Acylated with C18 fatty acid
  MOD_RES (24)..(24): Cys-PEG
HSQGTFTSDKSKYLDEQAAKEFICWLMNT

SEQ ID NO: 539 - protein, 29 aa, Artificial Sequence
  Synthetic peptide
  MISC_FEATURE: Glucagon E16 K20 K10-C18 Cys24-40K
  MOD_RES (10)..(10): Acylated with C18 fatty acid
  MOD_RES (24)..(24): Cys-PEG
HSQGTFTSDKSKYLDERRAKDFVCWLMNT

SEQ ID NO: 540 - protein, 29 aa, Artificial Sequence
  Synthetic peptide
  MISC_FEATURE: Glucagon E16 K20 K10-W-C18
  MISC_FEATURE: c-term amidation
  MOD_RES (10)..(10): Covalently bound to Trp residue comprising a C18 fatty acid
HSQGTFTSDKSKYLDERRAKDFVQWLMNT

SEQ ID NO: 541 - protein, 29 aa, Artificial Sequence
  Synthetic peptide
  MISC_FEATURE: Glucagon E16 K20 K10-W-C16 Cys24-40K
  MOD_RES (10)..(10): Covalently bound to Trp residue comprising a C16 fatty acid
  MOD_RES (24)..(24): Cys-PEG
HSQGTFTSDKSKYLDERRAKDFVCWLMNT

SEQ ID NO: 542 - protein, 29 aa, Artificial Sequence
  Synthetic peptide
  MISC_FEATURE: Glucagon E16 K20 K10-C16
  MISC_FEATURE: c-term amidation
  MOD_RES (10)..(10): Covalently bound to C16 fatty acid
HSQGTFTSDKSKYLDERRAKDFVQWLMNT

SEQ ID NO: 543 - protein, 29 aa, Artificial Sequence
  Synthetic peptide
  MISC_FEATURE: Glucagon E16 K20 K10-C16
  MISC_FEATURE: c-term amidation
  MOD_RES (10)..(10): Covalently bound to Trp residue comprising a C16 fatty acid
HSQGTFTSDKSKYLDERRAKDFVQWLMNT

SEQ ID NO: 544 - protein, 29 aa, Artificial Sequence
  Synthetic peptide
  MISC_FEATURE: Glucagon E16 K20 K10-C18
  MISC_FEATURE: c-term amidation
  MOD_RES (10)..(10): Covalently bound to C18 fatty acid
HSQGTFTSDKSKYLDERRAKDFVQWLMNT

SEQ ID NO: 545 - protein, 29 aa, Artificial Sequence
  Synthetic peptide
  MISC_FEATURE: Glucagon E16 K20
  MISC_FEATURE: c-term amidation
HSQGTFTSDYSKYLDERRAKDFVQWLMNT

SEQ ID NO: 546 - protein, 29 aa, Artificial Sequence
  Synthetic peptide
  MISC_FEATURE: Glucagon E16 K20 K10-W-C16 Cys 24-40K
  MISC_FEATURE: c-term amidation
  MOD_RES (10)..(10): Covalently bound to Trp residue comprising C16 fatty acid
  MOD_RES (24)..(24): Cys-PEG
HSQGTFTSDKSKYLDERRAKDFVCWLMNT

SEQ ID NO: 547 - protein, 29 aa, Artificial Sequence
  Synthetic peptide
  MISC_FEATURE: Glucagon E16 K20 K10-C18 Cys24-40K
  MISC_FEATURE: c-term amidation
  MOD_RES (10)..(10): Covalently bound to C18 fatty acid
  MOD_RES (24)..(24): Cys-PEG
HSQGTFTSDKSKYLDERRAKDFVCWLMNT

SEQ ID NO: 548 - protein, 29 aa, Artificial Sequence
  Synthetic peptide
  MISC_FEATURE: Glucagon E16 K20 K10-C18 Cys24-40K
  MISC_FEATURE: c-term amidation
  MOD_RES (10)..(10): Covalently bound to Trp residue comprising a C18 fatty acid
  MOD_RES (24)..(24): Cys-PEG
HSQGTFTSDKSKYLDERRAKDFVCWLMNT

SEQ ID NO: 549 - protein, 29 aa, Artificial Sequence
  Synthetic peptide
  MISC_FEATURE: Glucagon E16 K20 K10-C16 amide
  MISC_FEATURE: c-term amidation
  MOD_RES (10)..(10): Covalently bound to Glu residue comprising a C16 fatty acid
  MOD_RES (24)..(24): Cys-PEG
HSQGTFTSDKSKYLDERRAQDFVCWLMNT

SEQ ID NO: 550 - protein, 28 aa, Artificial Sequence
  Synthetic peptide
  MISC_FEATURE: Chimera 2 truncated by one amino acid
HSQGTFTSDYSKYLDEQAAKEFIAWLMN

SEQ ID NO: 551 - protein, 27 aa, Artificial Sequence
  Synthetic peptide
  MISC_FEATURE: Chimera 2 truncated by two amino acids
HSQGTFTSDYSKYLDEQAAKEFIAWLM

SEQ ID NO: 552 - protein, 28 aa, Artificial Sequence
  Synthetic peptide
  MISC_FEATURE: aa 1-28, E16 K20 C-terminal amide
  MISC_FEATURE: c-term amidation
HSQGTFTSDYSKYLDERRAKDFVQWLMN

SEQ ID NO: 553 - protein, 27 aa, Artificial Sequence
  Synthetic peptide
  MISC_FEATURE: aa 1-27 E16 K20 C-terminal amide
  MISC_FEATURE: c-term amidation
HSQGTFTSDYSKYLDERRAKDFVQWKM

SEQ ID NO: 554 - protein, 29 aa, Artificial Sequence
  Synthetic peptide
  MISC_FEATURE: c-term amidation
  MOD_RES (27)..(27): Norleucine
HSEGTFTSDYSKYLDEQAAKEFIAWLXNT

SEQ ID NO: 555 - protein, 39 aa, Artificial Sequence
  Synthetic peptide
  MISC_FEATURE (16)..(20): Lactam bridging side chains at positions 16 and 20
YSQGTFTSDYSKYLDEQAAKEFVNWLMNGGPSSGAPPPS

SEQ ID NO: 556 - protein, 29 aa, Artificial Sequence
  Synthetic peptide
  MISC_FEATURE: Chimera 2 with AIB at 16
  MISC_FEATURE: c-term amidation
  MOD_RES (16)..(16): Aminoisobutyric acid
HSQGTFTSDYSKYLDXQAAKEFIAWLMNT

SEQ ID NO: 557 - protein, 29 aa, Artificial Sequence
  Synthetic peptide
  MISC_FEATURE: c-term amidation
  MOD_RES (2)..(2): Aminoisobutyric acid
  MOD_RES (16)..(16): Aminoisobutyric acid
HXQGTFTSDYSKYLDXRRAQDFVQWLMNT

SEQ ID NO: 558 - protein, 29 aa, Artificial Sequence
  Synthetic peptide
  MISC_FEATURE: c-term amidation
  MOD_RES (2)..(2): Aminoisobutyric acid
  MISC_FEATURE (10)..(10): Covalently bound to Trp residue comprising a C16 fatty acid
  MOD_RES (16)..(16): Aminoisobutyric acid
  MOD_RES (24)..(24): Cys-PEG
HXQGTFTSDKSKYLDXRRAQDFVCWLMNT

SEQ ID NO: 559 - protein, 29 aa, Artificial Sequence
  Synthetic peptide
  MISC_FEATURE: c-term amidation
  MOD_RES (2)..(2): Aminoisobutric Acid
  MISC_FEATURE (10)..(10): Covalently bound to Trp residue comprising a C16 fatty acid
  MOD_RES (16)..(16): Aminoisobutric Acid
HXQGTFTSDKSKYLDXRRAQDFVCWLMNT

SEQ ID NO: 560 - protein, 29 aa, Artificial Sequence
  Synthetic peptide
  MISC_FEATURE: c-term amidation
  MOD_RES (2)..(2): Aminoisobutyric acid
  MISC_FEATURE (10)..(10): Covalently bound to Trp residue comprising a C16 fatty acid
  MOD_RES (16)..(16): Aminoisobutyric acid
  MOD_RES (20)..(20): Aminoisobutyric acid
  MOD_RES (24)..(24): Cys-PEG
HXQGTFTSDKSKYLDXRRAXDFVCWLMNT

SEQ ID NO: 561 - protein, 29 aa, Artificial Sequence
  Synthetic peptide
  MISC_FEATURE: c-term amidation
  MOD_RES (2)..(2): Aminoisobutyric acid
  MISC_FEATURE (10)..(10): Covalently bound to Trp residue comprising a C16 fatty acid
  MOD_RES (16)..(16): Aminoisobutyric acid
  MOD_RES (20)..(20): Aminoisobutyric acid
HXQGTFTSDKSKYLDXRRAXDFVCWLMNT

SEQ ID NO: 562 - protein, 29 aa, Artificial Sequence
  Synthetic peptide
  MISC_FEATURE: c-term amidation
  MOD_RES (2)..(2): Aminoisobutyric acid
  MOD_RES (16)..(16): Aminoisobutyric acid
HXQGTFTSDKSKYLDXRRAQDFVQWLMNT

SEQ ID NO: 563 - protein, 29 aa, Artificial Sequence
  Synthetic peptide
  MISC_FEATURE: c-term amidation
  MOD_RES (2)..(2): Aminoisobutyric Acid
  MOD_RES (10)..(10): Acylated with a C16 fatty acyl group
  MOD_RES (16)..(16): Aminoisobutyric Acid
HXQGTFTSDKSKYLDXRRAQDFVQWLMNT

SEQ ID NO: 564 - protein, 29 aa, Artificial Sequence
  Synthetic peptide
  MISC_FEATURE: c-term amidation
  MOD_RES (2)..(2): Aminoisobutyric Acid
  MOD_RES (10)..(10): Acylated with a C16 fatty acyl group via Ala-Ala spacer
  MOD_RES (16)..(16): Aminoisobutyric Acid
HXQGTFTSDKSKYLDXRRAQDFVQWLMNT

SEQ ID NO: 565 - protein, 29 aa, Artificial Sequence
  Synthetic peptide
  MISC_FEATURE: c-term amidation
  MOD_RES (2)..(2): Aminoisobutryic Acid
  MOD_RES (10)..(10): Acylated with a C16 fatty acyl group via gamma-Glu-gamma-Glu spacer
  MOD_RES (16)..(16): Aminoisobutryic Acid
HXQGTFTSDKSKYLDXRRAQDFVQWLMNT

SEQ ID NO: 566 - protein, 29 aa, Artificial Sequence
  Synthetic peptide
  MISC_FEATURE: c-term amidation
  MOD_RES (2)..(2): Aminoisobutryic Acid
  MOD_RES (10)..(10): Acylated with a C16 fatty acyl group via beta-Ala-beta-Ala spacer
  MOD_RES (16)..(16): Aminoisobutryic Acid
HXQGTFTSDKSKYLDXRRAQDFVQWLMNT

SEQ ID NO: 567 - protein, 29 aa, Artificial Sequence
  Synthetic peptide
  MISC_FEATURE: c-term amidation
  MOD_RES (2)..(2): Aminoisobutryic Acid
  MOD_RES (10)..(10): Acylated with a C16 fatty acyl group via 6-aminohexanoic acid spacer
  MOD_RES (16)..(16): Aminoisobutryic Acid
HXQGTFTSDKSKYLDXRRAQDFVQWLMNT

SEQ ID NO: 568 - protein, 29 aa, Artificial Sequence
  Synthetic peptide
  MISC_FEATURE: c-term amidation
  MOD_RES (2)..(2): Aminoisobutryic Acid
  MOD_RES (10)..(10): Acylated with a C16 fatty acyl group via Leu-Leu spacer
  MOD_RES (16)..(16): Aminoisobutryic Acid
HXQGTFTSDKSKYLDXRRAQDFVQWLMNT

SEQ ID NO: 569 - protein, 29 aa, Artificial Sequence
  Synthetic peptide
  MISC_FEATURE: c-term amidation
  MOD_RES (2)..(2): Aminoisobutryic Acid
  MOD_RES (10)..(10): Acylated with a C16 fatty acyl group via Pro-Pro spacer
  MOD_RES (16)..(16): Aminoisobutryic Acid
HXQGTFTSDKSKYLDXRRAQDFVQWLMNT

SEQ ID NO: 570 - protein, 29 aa, Artificial Sequence
  Synthetic peptide
  MISC_FEATURE: c-term amidation
  MOD_RES (2)..(2): Aminoisobutyric Acid
  MOD_RES (10)..(10): Acylated with a C14 fatty acyl group
  MOD_RES (16)..(16): Aminoisobutyric Acid
  MOD_RES (24)..(24): Pegylated
HXQGTFTSDKSKYLDXRRAQDFVCWLMNT

SEQ ID NO: 571 - protein, 29 aa, Artificial Sequence
  Synthetic peptide
  MISC_FEATURE: c-term amidation
  MOD_RES (2)..(2): Aminoisobutyric Acid
  MOD_RES (10)..(10): Acylated with a C14 fatty acyl group via gamma-Glu-gamma-Glu spacer
  MOD_RES (16)..(16): Aminoisobutyric Acid
  MOD_RES (24)..(24): Pegylated
HXQGTFTSDKSKYLDXRRAQDFVCWLMNT

SEQ ID NO: 572 - protein, 29 aa, Artificial Sequence
  Synthetic peptide
  MISC_FEATURE: c-term amidation
  MOD_RES (2)..(2): Aminoisobutryic Acid
  MOD_RES (10)..(10): Acylated with a C14 fatty acyl group via gamma-Glu-gamma-Glu spacer
  MOD_RES (16)..(16): Aminoisobutryic Acid
HXQGTFTSDKSKYLDXRRAQDFVQWLMNT

SEQ ID NO: 573 - protein, 29 aa, Artificial Sequence
  Synthetic peptide
  MISC_FEATURE: c-term amidation
  MOD_RES (2)..(2): Aminoisobutryic Acid
  MOD_RES (10)..(10): Acylated with a C14 fatty acyl group via Ala-Ala spacer
  MOD_RES (16)..(16): Aminoisobutryic Acid
  MOD_RES (24)..(24): Pegylated
HXQGTFTSDKSKYLDXRRAQDFVCWLMNT

SEQ ID NO: 574 - protein, 29 aa, Artificial Sequence
  Synthetic peptide
  MISC_FEATURE: c-term amidation
  MOD_RES (2)..(2): Aminoisobutryic Acid
  MOD_RES (10)..(10): Acylated with a C14 fatty acyl group via Ala-Ala spacer
  MOD_RES (16)..(16): Aminoisobutryic Acid
HXQGTFTSDKSKYLDXRRAQDFVQWLMNT

SEQ ID NO: 575 - protein, 29 aa, Artificial Sequence
  Synthetic peptide
  MISC_FEATURE: c-term amidation
  MOD_RES (2)..(2): Aminoisobutryic acid
  MOD_RES (10)..(10): Acylated with a C16 fatty acyl group via Ala-Ala spacer
  MOD_RES (16)..(16): Aminoisobutryic acid
  MOD_RES (24)..(24): Pegylated
HXQGTFTSDKSKYLDXRRAQDFVCWLMNT

SEQ ID NO: 576 - protein, 29 aa, Artificial Sequence
  Synthetic peptide
  MISC_FEATURE: c-term amidation
  MOD_RES (2)..(2): Aminoisobutryic Acid
  MOD_RES (10)..(10): Acylated with a C16 fatty acyl group via gamma-Glu-gamma-Glu spacer
  MOD_RES (16)..(16): Aminoisobutryic Acid
  MOD_RES (24)..(24): Pegylated
HXQGTFTSDKSKYLDXRRAQDFVCWLMNT

SEQ ID NO: 577 - protein, 29 aa, Artificial Sequence
  Synthetic peptide
  MISC_FEATURE: c-term amidation
  MOD_RES (10)..(10): Acylated with a C16 fatty acyl group
HSQGTFTSDKSKYLDSRRAQDFVQWLMNT

SEQ ID NO: 578 - protein, 29 aa, Artificial Sequence
  Synthetic peptide
  MISC_FEATURE: c-term amidation
  MOD_RES (10)..(10): Acylated with a C16 fatty acyl group via gamma-Glu-gamma-Glu spacer
HSQGTFTSDKSKYLDSRRAQDFVQWLMNT

SEQ ID NO: 579 - protein, 29 aa, Artificial Sequence
  Synthetic peptide
  MISC_FEATURE: AA-C16 Glucagon Amide
  MISC_FEATURE: c-term amidation
  MOD_RES (10)..(10): Acylated with a C16 fatty acyl group via Ala-Ala spacer
HSQGTFTSDKSKYLDSRRAQDFVQWLMNT

SEQ ID NO: 580 - protein, 29 aa, Artificial Sequence
  Synthetic peptide
  MISC_FEATURE: Chimera 2, AIB2, Lys10, Cys24-PEG
  MISC_FEATURE: c-term amidation
  MOD_RES (2)..(2): Aminoisobutryic Acid
  MOD_RES (24)..(24): Pegylated
HXQGTFTSDKSKYLDEQAAKEFICWLMNT

SEQ ID NO: 581 - protein, 30 aa, Artificial Sequence
  Synthetic peptide
  MISC_FEATURE: Peptide dS2E16K20K30-C14 Gluc Amide
  MISC_FEATURE: c-term amidation
  MOD_RES (2)..(2): Xaa is d-Ser
  MOD_RES (30)..(30): Acylated with a C14 fatty acyl group
HXQGTFTSDYSKYLDERRAKDFVQWLMNTK

SEQ ID NO: 582 - protein, 29 aa, Artificial Sequence
  Synthetic peptide
  MISC_FEATURE: Peptide dS2K10(C14)E16K20-Gluc Amide
  MISC_FEATURE: c-term amidation
  MOD_RES (2)..(2): Xaa is d-Ser
  MOD_RES (10)..(10): Acylated with a C14 fatty acyl group
HXQGTFTSDKSKYLDERRAKDFVQWLMNT

SEQ ID NO: 583 - protein, 30 aa, Artificial Sequence; identical to SEQ ID NO: 581
  Synthetic peptide
  MISC_FEATURE: Peptide dS2E16K20K30-C16 Gluc Amide
  MISC_FEATURE: c-term amidation
  MOD_RES (2)..(2): Xaa is d-Ser
  MOD_RES (30)..(30): Acylated with a C16 fatty acyl group

SEQ ID NO: 584 - protein, 29 aa, Artificial Sequence
  Synthetic peptide
  MISC_FEATURE: Peptide dS2K10(C16)E16K20-Gluc Amide
  MISC_FEATURE: c-term amidation
  MOD_RES (2)..(2): Xaa is d-Ser
  MOD_RES (10)..(10): Acylated with a C16 fatty acyl group
HXQGTFTSDKSKYLDERRAKDFVQWLMNT

SEQ ID NO: 585 - protein, 29 aa, Artificial Sequence
  Synthetic peptide
  MISC_FEATURE: Peptide Chimera 2-AIB2-K10-acylated
  MISC_FEATURE: c-term amidation
  MOD_RES (2)..(2): Aminoisobutryic Acid
  MOD_RES (10)..(10): Acylated with a C18 fatty acyl group
  MOD_RES (24)..(24): Pegylated
HXQGTFTSDKSKYLDEQAAKEFICWLMNT

SEQ ID NO: 586 - protein, 30 aa, Artificial Sequence
  Synthetic peptide
  MISC_FEATURE: Peptide Chimera 2-AIB2-K30-acylated
  MISC_FEATURE: c-term amidation
  MOD_RES (2)..(2): Aminoisobutryic Acid
  MOD_RES (24)..(24): Pegylated
  MOD_RES (30)..(30): Acylated with a C18 fatty acyl group
HXQGTFTSDYSKYLDEQAAKEFICWLMNTK

SEQ ID NO: 587 - protein, 29 aa, Artificial Sequence
  Synthetic peptide
  MISC_FEATURE: c-term amidation
  MOD_RES (1)..(1): DMIA
XSQGTFTSDYSKYLDERRAKDFVCWLMNT

SEQ ID NO: 588 - protein, 29 aa, Artificial Sequence
  Synthetic peptide
  MISC_FEATURE: c-term amidation
  MOD_RES (1)..(1): DMIA
  MOD_RES (16)..(20): Lactam ring between side chains of amino acids at positions 16 and 20
XSQGTFTSDYSKYLDERRAKDFVCWLMNT

SEQ ID NO: 589 - protein, 29 aa, Artificial Sequence
  Synthetic peptide
  MISC_FEATURE: c-term amidation
  MOD_RES (2)..(2): Aminoisobutryic Acid
HXEGTFTSDYSKYLDEQAAKEFICWLMNT

SEQ ID NO: 590 - protein, 29 aa, Artificial Sequence
  Synthetic peptide
  MISC_FEATURE: c-term amidation
  MOD_RES (2)..(2): Aminoisobutryic Acid
  MOD_RES (24)..(24): Pegylated
HXEGTFTSDYSKYLDEQAAKEFICWLMNT

SEQ ID NO: 591 - protein, 29 aa, Artificial Sequence
  Synthetic peptide
  MOD_RES (3)..(3): Xaa is a Glutamine analog
  MOD_RES (27)..(27): Xaa is Norleucine
HSXGTFTSDYSKYLDTRRAAEFVAWLXDE

SEQ ID NO: 592 - protein, 29 aa, Artificial Sequence
  Synthetic peptide
  MOD_RES (3)..(3): Xaa is a Glutamine analog
  MOD_RES (16)..(16): Xaa is Aib
HSXGTFTSDYSKYLDXRRAADFVAWLMDE

SEQ ID NO: 593 - protein, 29 aa, Artificial Sequence
  Synthetic peptide
  MOD_RES (27)..(27): Xaa is Norleucine
HSQGTFTSDYSKYLDTRRAAEFVAWLXDE

SEQ ID NO: 594 - protein, 29 aa, Artificial Sequence
  Synthetic peptide
  MOD_RES (3)..(3): Xaa is Acetamidomethyl-cysteine
  MOD_RES (27)..(27): Xaa is Norleucine
HSXGTFTSDYSKYLDTRRAAEFVAWLXDE

SEQ ID NO: 595 - protein, 29 aa, Artificial Sequence
  Synthetic peptide
  MOD_RES (3)..(3): Xaa is Acetyldiaminobutanoic acid
  MOD_RES (27)..(27): Xaa is Norleucine
HSXGTFTSDYSKYLDTRRAAEFVAWLXDE

SEQ ID NO: 596 - protein, 29 aa, Artificial Sequence
  Synthetic peptide
  MOD_RES (3)..(3): Xaa is carbamoyldiaminopropanoic acid
  MOD_RES (27)..(27): Xaa is Norleucine
HSXGTFTSDYSKYLDTRRAAEFVAWLXDE

SEQ ID NO: 597 - protein, 29 aa, Artificial Sequence
  Synthetic peptide
  MOD_RES (3)..(3): Xaa is Methylglutamine
  MOD_RES (27)..(27): Xaa is Norleucine
HSXGTFTSDYSKYLDTRRAAEFVAWLXDE

SEQ ID NO: 598 - protein, 29 aa, Artificial Sequence
  Synthetic peptide
  MOD_RES (3)..(3): Xaa is Methionine sulfoxide
  MOD_RES (27)..(27): Xaa is Norleucine
HSXGTFTSDYSKYLDTRRAAEFVAWLXDE

SEQ ID NO: 599 - protein, 29 aa, Artificial Sequence
  Synthetic peptide
  MOD_RES (3)..(3): Acetylornithine
  MOD_RES (27)..(27): Xaa is Norleucine
HSXGTFTSDYSKYLDTRRAAEFVAWLXDE

SEQ ID NO: 600 - protein, 29 aa, Artificial Sequence
  Synthetic peptide
  MOD_RES (16)..(16): Xaa is Aminoisobutryic Acid
HSQGTFTSDYSKYLDXRRAADFVAWLMDE

SEQ ID NO: 601 - protein, 29 aa, Artificial Sequence
  Synthetic peptide
  MOD_RES (3)..(3): Xaa is Acetyldiaminobutanoic acid
  MOD_RES (16)..(16): Xaa is Aminoisobutyric Acid
HSXGTFTSDYSKYLDXRRAADFVAWLMDE

SEQ ID NO: 602 - protein, 29 aa, Artificial Sequence
  Synthetic peptide
  MOD_RES (3)..(3): Xaa is Methylglutamine
  MOD_RES (16)..(16): Xaa is Aminoisobutyric Acid
HSXGTFTSDYSKYLDXRRAADFVAWLMDE

SEQ ID NO: 603 - protein, 29 aa, Artificial Sequence
  Synthetic peptide
  MOD_RES (3)..(3): Xaa is Acetyldiaminobutanoic acid
  MOD_RES (16)..(16): Xaa is Aminoisobutryic Acid
HSXGTFTSDYSKYLDXRRAADFVAWLLDE

SEQ ID NO: 604 - protein, 39 aa, Artificial Sequence
  Synthetic peptide
  MISC_FEATURE: c-term amidation
  MOD_RES (3)..(3): Xaa is Acetyldiaminobutanoic acid
  MOD_RES (16)..(16): Xaa is Aminoisobutyric Acid
HSXGTFTSDYSKYLDXRRAADFVAWLLDTGPSSGAPPPS

SEQ ID NO: 605 - protein, 29 aa, Artificial Sequence
  Synthetic peptide
  MOD_RES (3)..(3): Xaa is Acetyldiaminobutanoic acid
  MOD_RES (16)..(16): Xaa is Aminoisobutryic Acid
HSXGTFTSDYSKYLDXRRASDFVSWLLDE

SEQ ID NO: 606 - protein, 29 aa, Artificial Sequence
  Synthetic peptide
  MOD_RES (3)..(3): Xaa is Acetyldiaminobutanoic acid
  MOD_RES (16)..(16): Xaa is Aminoisobutryic Acid
HSXGTFTSDYSKYLDXRRATDFVTWLLDE

SEQ ID NO: 607 - protein, 29 aa, Artificial Sequence
  Synthetic peptide
  MISC_FEATURE: c-term amidation
  MOD_RES (1)..(1): Xaa is Dmia
  MOD_RES (10)..(10): Covalently bound to a C14 fatty acyl group
  MOD_RES (16)..(20): Lactam ring between side chains of amino acids at positions 16 and 20
XSQGTFTSDKSKYLDERRAKDFVQWLMNT

SEQ ID NO: 608 - protein, 29 aa, Artificial Sequence
  Synthetic peptide
  MISC_FEATURE: c-term amidation
  MOD_RES (1)..(1): DMIA
  MOD_RES (10)..(10): Covalently bound to C16 fatty acyl group
  MOD_RES (16)..(20): Lactam ring between side chains of amino acids at positions 16 and 20
XSQGTFTSDKSKYLDERRAKDFVQWLMNT

SEQ ID NO: 609 - protein, 29 aa, Artificial Sequence
  Synthetic peptide
  MISC_FEATURE: c-term amidation
  MOD_RES (1)..(1): DMIA
  MOD_RES (10)..(10): Covalently bound to C18 fatty acyl group
  MOD_RES (16)..(20): Lactam ring between side chains of amino acids at positions 16 and 20
XSQGTFTSDKSKYLDERRAKDFVQWLMNT

SEQ ID NO: 610 - protein, 29 aa, Artificial Sequence
  Synthetic peptide
  MISC_FEATURE: c-term amidation
  MOD_RES (2)..(2): Aminoisobutryic Acid
  MOD_RES (10)..(10): Covalently bound to C14 fatty acyl group
  MOD_RES (16)..(16): Aminoisobutryic Acid
HXQGTFTSDKSKYLDXRRAQDFVQWLMNT

SEQ ID NO: 611 - protein, 29 aa, Artificial Sequence
  Synthetic peptide
  MISC_FEATURE: c-term amidation
  MOD_RES (2)..(2): Aminoisobutryic Acid
  MOD_RES (10)..(10): Covalently bound to C16 fatty acyl group
  MOD_RES (16)..(16): Aminoisobutryic Acid
HXQGTFTSDKSKYLDXRRAQDFVQWLMNT

SEQ ID NO: 612 - protein, 29 aa, Artificial Sequence
  Synthetic peptide
  MISC_FEATURE: c-term amidation
  MOD_RES (2)..(2): Aminoisobutryic Acid
  MOD_RES (10)..(10): Covalently bound to C18 fatty acyl group
  MOD_RES (16)..(16): Aminoisobutryic Acid
HXQGTFTSDKSKYLDXRRAQDFVQWLMNT

SEQ ID NO: 613 - protein, 29 aa, Artificial Sequence
  Synthetic peptide
  MISC_FEATURE: c-term amidation
  MOD_RES (2)..(2): Xaa is d-Ser
  MOD_RES (10)..(10): Covalently bound to C14 fatty acyl group
HXQGTFTSDKSKYLDERRAKDFVQWLMNT

SEQ ID NO: 614 - protein, 29 aa, Artificial Sequence
  Synthetic peptide
  MISC_FEATURE: c-term amidation
  MOD_RES (2)..(2): Xaa is d-Ser
  MOD_RES (10)..(10): Covalently bound to C16 fatty acyl group
HXQGTFTSDKSKYLDERRAKDFVQWLMNT

SEQ ID NO: 615 - protein, 29 aa, Artificial Sequence
  Synthetic peptide
  MISC_FEATURE: c-term amidation
  MOD_RES (2)..(2): Xaa is d-Ser
  MOD_RES (10)..(10): Covalently bound to a C18 fatty acyl group
HXQGTFTSDKSKYLDERRAKDFVQWLMNT

SEQ ID NO: 616 - protein, 29 aa, Artificial Sequence
  Synthetic peptide
  MISC_FEATURE: c-term amidation
  MOD_RES (2)..(2): Aminoisobutyric Acid
  MOD_RES (10)..(10): Covalently bound to a C14 fatty acyl group
  MOD_RES (16)..(16): Aminoisobutyric Acid
HXQGTFTSDKSKYLDXRRAQDFVCWLMNT

SEQ ID NO: 617 - protein, 29 aa, Artificial Sequence
  Synthetic peptide
  MISC_FEATURE: c-term amidation
  MOD_RES (2)..(2): Aminoisobutryic Acid
  MOD_RES (10)..(10): Covalently bound to C14 fatty acyl group via gamma-Glu-gamma-Glu spacer
  MOD_RES (16)..(16): Aminoisobutryic Acid
HXQGTFTSDKSKYLDXRRAQDFVCWLMNT

SEQ ID NO: 618 - protein, 29 aa, Artificial Sequence
  Synthetic peptide
  MISC_FEATURE: c-term amidation
  MOD_RES (2)..(2): Aminoisobutryic Acid
  MOD_RES (10)..(10): Covalently bound to C14 fatty acyl group via Ala-Ala spacer
  MOD_RES (16)..(16): Aminoisobutryic Acid
HXQGTFTSDKSKYLDXRRAQDFVCWLMNT

SEQ ID NO: 619 - protein, 29 aa, Artificial Sequence
  Synthetic peptide
  MISC_FEATURE: c-term amidation
  MOD_RES (2)..(2): Aminoisobutyric Acid
  MOD_RES (10)..(10): Covalently bound to C16 fatty acyl group via di peptide spacer
  MOD_RES (16)..(16): Aminoisobutyric Acid
HXQGTFTSDKSKYLDXRRAQDFVCWLMNT

SEQ ID NO: 620 - protein, 29 aa, Artificial Sequence
  Synthetic peptide
  MISC_FEATURE: c-term amidation
  MOD_RES (2)..(2): Aminoisobutyric Acid
  MOD_RES (10)..(10): Covelently bound to C16 fatty acyl group via Ala-Ala spacer
  MOD_RES (16)..(16): Aminoisobutyric Acid
HXQGTFTSDKSKYLDXRRAQDFVCWLMNT

SEQ ID NO: 621 - protein, 29 aa, Artificial Sequence
  Synthetic peptide
  MISC_FEATURE: c-term amidation
  MOD_RES (2)..(2): Aminoisobutyric Acid
  MOD_RES (10)..(10): Covalently bound to C16 fatty acyl group
  MOD_RES (16)..(16): Aminoisobutyric Acid
HXQGTFTSDKSKYLDXRRAQDFVCWLMNT

SEQ ID NO: 622 - protein, 30 aa, Artificial Sequence
  Synthetic peptide
  MISC_FEATURE: c-term amidation
  MOD_RES (2)..(2): Aminoisobutyric Acid
  MOD_RES (10)..(10): Covalently bound to C16 fatty acyl group
  MOD_RES (16)..(16): Aminoisobutyric Acid
HXQGTFTSDKSKYLDXRRAQDFVCWLMNTK

SEQ ID NO: 623 - protein, 29 aa, Artificial Sequence
  Synthetic peptide
  MISC_FEATURE: beta-Ala-beta-Ala - C16 Glucagon Amide
  MISC_FEATURE: c-term amidation
  MISC_FEATURE (10)..(10): Acylated with a C16 fatty acyl group via beta-Ala-beta-Ala spacer
HSQGTFTSDKSKYLDSRRAQDFVQWLMNT

SEQ ID NO: 624 - protein, 29 aa, Artificial Sequence
  Synthetic peptide
  MISC_FEATURE: Chimera-2 Aib2C24Mal40KPEG
  MOD_RES (2)..(2): Xaa is Aib
  MOD_RES (24)..(24): Covalently bound to 40kDa PEG via thioether made by reaction of peptide with a maleimide-activated PEG
  MOD_RES (29)..(29): AMIDATION
HXQGTFTSDYSKYLDEQAAKEFICWLMNT

SEQ ID NO: 625 - protein, 29 aa, Artificial Sequence
  Synthetic peptide
  MISC_FEATURE: Chimera-2 Aib2E16K20lactamC24Mal40KPEG
  MOD_RES (2)..(2): Xaa is Aib
  MISC_FEATURE (16)..(20): Lactam ring between side chains of the amino acids at positions 16 and 20
  MOD_RES (24)..(24): Covalently bound to 40kDa PEG via thioether made by reaction of peptide with a maleimide-activated PEG
  MOD_RES (29)..(29): AMIDATION
HXQGTFTSDYSKYLDEQAAKEFICWLMNT

SEQ ID NO: 626 - protein, 29 aa, Artificial Sequence
  Synthetic peptide
  MISC_FEATURE: Glucagon Aib2E16K20lactamC24amideMal40KPEG
  MOD_RES (2)..(2): Xaa is Aib
  MISC_FEATURE (16)..(20): Lactam ring between side chains of amino acids at positions 16 and 20
  MOD_RES (24)..(24): Covalently bound to 40kDa PEG via thioether made by reaction of peptide with a maleimide-activated PEG
  MOD_RES (29)..(29): AMIDATION
HXQGTFTSDYSKYLDERRAKDFVCWLMNT

SEQ ID NO: 627 - skipped

SEQ ID NO: 628 - protein, 29 aa, Artificial Sequence
  Synthetic peptide
  MISC_FEATURE: Glucagon Dmia1E16K20lactamC24Mal40KPEG
  MOD_RES (1)..(1): Xaa is Dmia
  MISC_FEATURE (16)..(20): Lactam ring between side chains of amino acids at positions 16 and 20
  MOD_RES (24)..(24): Covalently bound to 40kDa PEG via thioether made by reaction of peptide with a maleimide-activated PEG
  MOD_RES (29)..(29): AMIDATION
XSQGTFTSDYSKYLDERRAKDFVCWLMNT

SEQ ID NO: 629 - protein, 29 aa, Artificial Sequence
  Synthetic peptide
  MISC_FEATURE: Glucagon Dmia1E16K20lactamC24Mal40KPEG
  MOD_RES (1)..(1): Xaa is Dmia
  MISC_FEATURE (16)..(20): Lactam ring between side chains of amino acids at positions 16 and 20
  MISC_FEATURE (24)..(24): Covalently bound to 40kDa PEG via thioether made by reaction of peptide with a maleimide-activated PEG
XSQGTFTSDYSKYLDERRAKDFVCWLMNT

SEQ ID NO: 630 - protein, 29 aa, Artificial Sequence
  Synthetic peptide
  MISC_FEATURE: Glucagon Dmia1E16K20lactamC24thioether40KPEG
  MOD_RES (1)..(1): Xaa is Dmia
  MISC_FEATURE (16)..(20): Lactam ring between side chains of amino acids at position 16 and 20
  MOD_RES (24)..(24): Covalently bound to 40kDa PEG via thioether made by reaction of peptide with haloacetyl-activated PEG
  MOD_RES (29)..(29): AMIDATION
XSQGTFTSDYSKYLDERRAKDFVCWLMNT

SEQ ID NO: 631 - protein, 29 aa, Artificial Sequence
  Synthetic peptide
  MISC_FEATURE: Chimera2 Aib2E3C24-Thioether40K PEG(NOF)
  MOD_RES (2)..(2): Xaa is Aib
  MOD_RES (24)..(24): Covalently bound to 40kDa PEG via thioether made by reaction of peptide with haloacetyl-activated PEG
  MOD_RES (29)..(29): AMIDATION
HXEGTFTSDYSKYLDEQAAKEFICWLMNT

SEQ ID NO: 632 - protein, 29 aa, Artificial Sequence
  Synthetic peptide
  MOD_RES (1)..(1): Xaa is Dmia
  MOD_RES (24)..(24): Covalently bound to 40kDa PEG
  MOD_RES (29)..(29): AMIDATION
XSEGTFTSDYSKYLEERRAKDFVCWLMNT

SEQ ID NO: 633 - protein, 29 aa, Artificial Sequence
  Synthetic peptide
  MISC_FEATURE: Glucagon Aib2Aib16C24K10(rErE-C16) C24PEG40K amide
  MOD_RES (2)..(2): Xaa is Aib
  MOD_RES (10)..(10): Covalently bound to C14 fatty acyl group via gamma-Glu-gamma-Glu spacer
  MOD_RES (16)..(16): Xaa is Aib
  MOD_RES (24)..(24): Covalently bound to 40kDa PEG via thioether made by reaction of peptide with haloacetyl-activated PEG
  MOD_RES (29)..(29): AMIDATION
HXQGTFTSDKSKYLDXRRAQDFVCWLMNT

SEQ ID NO: 634 - protein, 29 aa, Artificial Sequence
  Synthetic peptide
  MISC_FEATURE: Glucagon Aib2Aib16K10(AA-C14)C24PEG40K TE amide
  MOD_RES (2)..(2): Xaa is Aib
  MOD_RES (10)..(10): Covalently bound to C14 fatty acyl group via Ala-Ala spacer
  MOD_RES (16)..(16): Xaa is Aib
  MOD_RES (24)..(24): Covalently bound to 40kDa PEG via thioether made by reaction of peptide with haloacetyl-activated PEG
  MOD_RES (29)..(29): AMIDATION
HXQGTFTSDKSKYLDXRRAQDFVCWLMNT

SEQ ID NO: 635 - protein, 29 aa, Artificial Sequence
  Synthetic peptide
  MISC_FEATURE: Glucagon Aib2Aib16K10(AA-C16) amide
  MOD_RES (2)..(2): Xaa is Aib
  MOD_RES (10)..(10): Covalently bound to C16 fatty acyl group via Ala-Ala spacer
  MOD_RES (16)..(16): Xaa is Aib
  MOD_RES (29)..(29): AMIDATION
HXQGTFTSDKSKYLDXRRAQDFVQWLMNT

SEQ ID NO: 636 - protein, 29 aa, Artificial Sequence
  Synthetic peptide
  MISC_FEATURE: Glucagon Aib2Aib16K10(rErE-C16) amide
  MOD_RES (2)..(2): Xaa is Aib
  MOD_RES (10)..(10): Covalently bound to C16 fatty acyl group via gamma-Glu-gamma-Glu spacer
  MOD_RES (16)..(16): Xaa is Aib
  MOD_RES (29)..(29): AMIDATION
HXQGTFTSDKSKYLDXRRAQDFVQWLMNT

SEQ ID NO: 637 - protein, 29 aa, Artificial Sequence
  Synthetic peptide
  MOD_RES (2)..(2): Xaa is Aib
  MOD_RES (16)..(16): Xaa is Aib
  MOD_RES (29)..(29): AMIDATION
HXQGTFTSDYSKYLDXRRAQDFVQWLMNT

SEQ ID NO: 638 - DNA, 20 bp, Artificial Sequence
  Synthetic primer
caaggtccagggaggttgtg

SEQ ID NO: 639 - DNA, 24 bp, Artificial Sequence
  Synthetic primer
ccaaaggtaagctgtccataagga

SEQ ID NO: 640 - DNA, 22 bp, Artificial Sequence
  Synthetic primer
ctctcccaagagtcacatgtcc

SEQ ID NO: 641 - DNA, 22 bp, Artificial Sequence
  Synthetic primer
caataactcggtcccctacaac

SEQ ID NO: 642 - protein, 29 aa, Artificial Sequence
  Synthetic peptide
HSQGTFTSDYSKYLDSRRAQDFVQWLMDT

SEQ ID NO: 643 - protein, 29 aa, Artificial Sequence
  Synthetic peptide
  MISC_FEATURE: c-term amidation
  MOD_RES (2)..(2): Xaa is d-Ser
  MOD_RES (10)..(10): Acylated with a C16 fatty acyl group via gamma-Glu spacer
HXQGTFTSDKSKYLDEQAAKEFIAWLMNT

SEQ ID NO: 644 - protein, 29 aa, Artificial Sequence
  Synthetic peptide
  MISC_FEATURE: c-term amidation
  MOD_RES (2)..(2): Xaa is d-Ser
  MOD_RES (10)..(10): Acylated with a C16 fatty acyl group via gamma-Glu-gamma-Glu spacer
HXQGTFTSDKSKYLDEQAAKEFIAWLMNT

SEQ ID NO: 645 - protein, 29 aa, Artificial Sequence
  Synthetic peptide
  MISC_FEATURE: c-term amidation
  MOD_RES (2)..(2): Xaa is Aib
  MOD_RES (10)..(10): Acylated with a C16 fatty acyl group via gamma-Glu spacer
HXQGTFTSDKSKYLDEQAAKEFIAWLMNT

SEQ ID NO: 646 - protein, 29 aa, Artificial Sequence
  Synthetic peptide
  MISC_FEATURE: c-term amidation
  MOD_RES (2)..(2): Xaa is Aib
  MOD_RES (10)..(10): Acylated with a C16 fatty acyl group via gamma-Glu-gamma-Glu spacer
HXQGTFTSDKSKYLDEQAAKEFIAWLMNT

SEQ ID NO: 647 - protein, 29 aa, Artificial Sequence
  Synthetic peptide
  MISC_FEATURE: c-term amidation
  MOD_RES (2)..(2): Xaa is Aib
  MOD_RES (10)..(10): Acylated with a C16 fatty acyl group
HXEGTFTSDKSKYLDEQAAKEFIAWLMNT

SEQ ID NO: 648 - protein, 29 aa, Artificial Sequence
  Synthetic peptide
  MISC_FEATURE: c-term amidation
  MOD_RES (2)..(2): Xaa is Aib
  MOD_RES (10)..(10): Acylated with a C16 fatty acyl group via gamma-Glu-gamma-Glu spacer
HXEGTFTSDKSKYLDEQAAKEFIAWLMNT

SEQ ID NO: 649 - protein, 29 aa, Artificial Sequence
  Synthetic peptide
  MISC_FEATURE: c-term amidation
  MOD_RES (2)..(2): Xaa is Aib
  MOD_RES (10)..(10): Acylated with a C16 fatty acyl group via gamma-Glu spacer
HXQGTFISDKSKYLDEQAAKEFIAWLMNT

SEQ ID NO: 650 - protein, 29 aa, Artificial Sequence
  Synthetic peptide
  MISC_FEATURE: c-term amidation
  MOD_RES (2)..(2): Xaa is Aib
  MOD_RES (10)..(10): Acylated with a C16 fatty acyl group via gamma-Glu-gamma-Glu spacer
HXQGTFISDKSKYLDEQAAKEFIAWLMNT

SEQ ID NO: 651 - protein, 29 aa, Artificial Sequence
  Synthetic peptide
  MISC_FEATURE: c-term amidation
  MOD_RES (1)..(1): Xaa is Dmia
  MOD_RES (10)..(10): Acylated with a C16 fatty acyl group via gamma-Glu spacer
  MISC_FEATURE (16)..(20): Lactam ring between side chains of amino acids at positions 16 and 20
XSQGTFTSDKSKYLDERRAKDFVQWLMNT

SEQ ID NO: 652 - protein, 29 aa, Artificial Sequence
  Synthetic peptide
  MISC_FEATURE: c-term amidation
  MOD_RES (1)..(1): Xaa is Dmia
  MOD_RES (10)..(10): Acylated with a C16 fatty acyl group via gamma-Glu-gamma-Glu spacer
  MISC_FEATURE (16)..(20): Lactam ring between side chains of amino acids at positions 16 and 20
XSQGTFTSDKSKYLDERRAKDFVQWLMNT

SEQ ID NO: 653 - protein, 29 aa, Artificial Sequence
  Synthetic peptide
  MISC_FEATURE: c-term amidation
  MOD_RES (1)..(1): Xaa is Dmia
  MISC_FEATURE (16)..(20): Lactam ring between side chains of amino acids at positions 16 and 20
  MOD_RES (29)..(29): Acylated with a C16 fatty acyl group via gamma-Glu spacer
XSQGTFTSDYSKYLDERRAKDFVQWLMNK

SEQ ID NO: 654 - protein, 29 aa, Artificial Sequence
  Synthetic peptide
  MISC_FEATURE: c-term amidation
  MOD_RES (1)..(1): Xaa is Dmia
  MISC_FEATURE (16)..(20): Lactam ring between side chains of amino acids at positions 16 and 20
  MOD_RES (29)..(29): Acylated with a C16 fatty acyl group via gamma-Glu-gamma-Glu spacer
XSQGTFTSDYSKYLDERRAKDFVQWLMNK

SEQ ID NO: 655 - protein, 29 aa, Artificial Sequence
  Synthetic peptide
  MISC_FEATURE: c-term amidation
  MOD_RES (2)..(2): Xaa is Aib
  MOD_RES (10)..(10): Acylated with a C16 fatty acyl group via gamma-Glu-gamma-Glu spacer
  MOD_RES (16)..(16): Xaa is Aib
HXQGTFTSDKSKYLDXRAAQDFVQWLMDT

SEQ ID NO: 656 - protein, 29 aa, Artificial Sequence
  Synthetic peptide
  MISC_FEATURE: c-term amidation
  MOD_RES (2)..(2): Xaa is Aib
  MOD_RES (10)..(10): Acylated with a C16 fatty acyl group via gamma-Glu spacer
  MOD_RES (16)..(16): Xaa is Aib
HXQGTFTSDKSKYLDXRAAQDFVQWLMDT

SEQ ID NO: 657 - protein, 29 aa, Artificial Sequence
  Synthetic peptide
  MISC_FEATURE: c-term amidation
  MOD_RES (2)..(2): Aminoisobutryic Acid
  MOD_RES (10)..(10): Acylated with a C16 fatty acyl group via dipeptide spacer
  MOD_RES (16)..(16): Aminoisobutryic Acid
HXQGTFTSDKSKYLDXRRAQDFVQWLMNT

SEQ ID NO: 658 - protein, 29 aa, Artificial Sequence
  Synthetic peptide
  MISC_FEATURE: c-term amidation
  MOD_RES (2)..(2): Aminoisobutyric Acid
  MOD_RES (10)..(10): Acylated with a C14 fatty acyl group via dipeptide spacer
  MOD_RES (16)..(16): Aminoisobutyric Acid
  MOD_RES (24)..(24): Pegylated
HXQGTFTSDKSKYLDXRRAQDFVCWLMNT

SEQ ID NO: 659 - protein, 29 aa, Artificial Sequence
  Synthetic peptide
  MISC_FEATURE: c-term amidation
  MOD_RES (2)..(2): Aminoisobutryic Acid
  MOD_RES (10)..(10): Acylated with a C14 fatty acyl group via dipeptide spacer
  MOD_RES (16)..(16): Aminoisobutryic Acid
HXQGTFTSDKSKYLDXRRAQDFVQWLMNT

SEQ ID NO: 660 - protein, 29 aa, Artificial Sequence
  Synthetic peptide
  MISC_FEATURE: c-term amidation
  MOD_RES (2)..(2): Aminoisobutryic Acid
  MOD_RES (10)..(10): Acylated with a C16 fatty acyl group via dipeptide spacer
  MOD_RES (16)..(16): Aminoisobutryic Acid
  MOD_RES (24)..(24): Pegylated
HXQGTFTSDKSKYLDXRRAQDFVCWLMNT

SEQ ID NO: 661 - protein, 29 aa, Artificial Sequence
  Synthetic peptide
  MISC_FEATURE: c-term amidation
  MOD_RES (10)..(10): Acylated with a C16 fatty acyl group via dipeptide spacer
HSQGTFTSDKSKYLDSRRAQDFVQWLMNT

SEQ ID NO: 662 - protein, 30 aa, Artificial Sequence; identical to SEQ ID NO: 581
  Synthetic peptide
  MISC_FEATURE: Peptide dS2E16K20K30-C14 Gluc Amide
  MISC_FEATURE: c-term amidation
  MOD_RES (2)..(2): D-serine, D-alanine, valine, amino n-butyric acid, glycine, N-methyl serine, aminoisobutyric acid
  MOD_RES (30)..(30): Acylated with a C14 fatty acyl group

SEQ ID NO: 663 - protein, 29 aa, Artificial Sequence
  Synthetic peptide
  MISC_FEATURE: Peptide dS2K10(C14)E16K20-Gluc Amide
  MISC_FEATURE: c-term amidation
  MOD_RES (2)..(2): D-serine, D-alanine, valine, amino n-butyric acid, glycine, N-methyl serine, aminoisobutyric acid
  MOD_RES (10)..(10): Acylated with a C14 fatty acyl group
HXQGTFTSDKSKYLDERRAKDFVQWLMNT

SEQ ID NO: 664 - protein, 30 aa, Artificial Sequence; identical to SEQ ID NO: 581
  Synthetic peptide
  MISC_FEATURE: Peptide dS2E16K20K30-C16 Gluc Amide
  MISC_FEATURE: c-term amidation
  MOD_RES (2)..(2): D-serine, D-alanine, valine, amino n-butyric acid, glycine, N-methyl serine, aminoisobutyric acid
  MOD_RES (30)..(30): Acylated with a C16 fatty acyl group

SEQ ID NO: 665 - protein, 29 aa, Artificial Sequence
  Synthetic peptide
  MISC_FEATURE: Peptide dS2K10(C16)E16K20-Gluc Amide
  MISC_FEATURE: c-term amidation
  MOD_RES (2)..(2): D-serine, D-alanine, valine, amino n-butyric acid, glycine, N-methyl serine, aminoisobutyric acid
  MOD_RES (10)..(10): Acylated with a C16 fatty acyl group
HXQGTFTSDKSKYLDERRAKDFVQWLMNT

SEQ ID NO: 666 - protein, 29 aa, Artificial Sequence
  Synthetic peptide
  MISC_FEATURE: c-term amidation
  MOD_RES (2)..(2): D-serine, D-alanine, valine, amino n-butyric acid, glycine, N-methyl serine, aminoisobutyric acid
  MOD_RES (10)..(10): Covalently bound to C14 fatty acyl group
HXQGTFTSDKSKYLDERRAKDFVQWLMNT

SEQ ID NO: 667 - protein, 29 aa, Artificial Sequence
  Synthetic peptide
  MISC_FEATURE: c-term amidation
  MOD_RES (2)..(2): D-serine, D-alanine, valine, amino n-butyric acid, glycine, N-methyl serine, aminoisobutyric acid
  MOD_RES (10)..(10): Covalently bound to C16 fatty acyl group
HXQGTFTSDKSKYLDERRAKDFVQWLMNT

SEQ ID NO: 668 - protein, 29 aa, Artificial Sequence
  Synthetic peptide
  MISC_FEATURE: c-term amidation
  MOD_RES (2)..(2): D-serine, D-alanine, valine, amino n-butyric acid, glycine, N-methyl serine, aminoisobutyric acid
  MOD_RES (10)..(10): Covalently bound to a C18 fatty acyl group
HXQGTFTSDKSKYLDERRAKDFVQWLMNT

SEQ ID NO: 669 - protein, 29 aa, Artificial Sequence
  Synthetic peptide
  MISC_FEATURE: c-term amidation
  MOD_RES (2)..(2): Aminoisobutryic Acid
  MOD_RES (10)..(10): Covalently bound to C14 fatty acyl group via dipeptide spacer
  MOD_RES (16)..(16): Aminoisobutryic Acid
HXQGTFTSDKSKYLDXRRAQDFVCWLMNT

SEQ ID NO: 670 - protein, 29 aa, Artificial Sequence
  Synthetic peptide
  MISC_FEATURE: Glucagon Aib2Aib16C24K10(rErE-C16) C24PEG40K amide
  MOD_RES (2)..(2): Xaa is Aib
  MOD_RES (10)..(10): Covalently bound to C14 fatty acyl group via dipeptide spacer
  MOD_RES (16)..(16): Xaa is Aib
  MOD_RES (24)..(24): Covalently bound to 40kDa PEG via thioether made by reaction of peptide with haloacetyl-activated PEG
  MOD_RES (29)..(29): AMIDATION
HXQGTFTSDKSKYLDXRRAQDFVCWLMNT

SEQ ID NO: 671 - protein, 29 aa, Artificial Sequence
  Synthetic peptide
  MISC_FEATURE: Glucagon Aib2Aib16K10(rErE-C16) amide
  MOD_RES (2)..(2): Xaa is Aib
  MOD_RES (10)..(10): Covalently bound to C16 fatty acyl group via dipeptide spacer
  MOD_RES (16)..(16): Xaa is Aib
  MOD_RES (29)..(29): AMIDATION
HXQGTFTSDKSKYLDXRRAQDFVQWLMNT

SEQ ID NO: 672 - protein, 29 aa, Artificial Sequence
  Synthetic peptide
  MISC_FEATURE: c-term amidation
  MOD_RES (2)..(2): D-serine, D-alanine, valine, amino n-butyric acid, glycine, N-methyl serine, aminoisobutyric acid
  MOD_RES (10)..(10): Acylated with a C16 fatty acyl group via acidic amino acid spacer
HXQGTFTSDKSKYLDEQAAKEFIAWLMNT

SEQ ID NO: 673 - protein, 29 aa, Artificial Sequence
  Synthetic peptide
  MISC_FEATURE: c-term amidation
  MOD_RES (2)..(2): D-serine, D-alanine, valine, amino n-butyric acid, glycine, N-methyl serine, aminoisobutyric acid
  MOD_RES (10)..(10): Acylated with a C16 fatty acyl group via dipeptide spacer
HXQGTFTSDKSKYLDEQAAKEFIAWLMNT

SEQ ID NO: 674 - protein, 29 aa, Artificial Sequence
  Synthetic peptide
  MISC_FEATURE: c-term amidation
  MOD_RES (2)..(2): Xaa is Aib
  MOD_RES (10)..(10): Acylated with a C16 fatty acyl group via acidic amino acid spacer
HXQGTFTSDKSKYLDEQAAKEFIAWLMNT

SEQ ID NO: 675 - protein, 29 aa, Artificial Sequence
  Synthetic peptide
  MISC_FEATURE: c-term amidation
  MOD_RES (2)..(2): Xaa is Aib
  MOD_RES (10)..(10): Acylated with a C16 fatty acyl group via dipeptide spacer
HXQGTFTSDKSKYLDEQAAKEFIAWLMNT

SEQ ID NO: 676 - protein, 29 aa, Artificial Sequence
  Synthetic peptide
  MISC_FEATURE: c-term amidation
  MOD_RES (2)..(2): Xaa is Aib
  MOD_RES (10)..(10): Acylated with a C16 fatty acyl group via dipeptide spacer
HXEGTFTSDKSKYLDEQAAKEFIAWLMNT

SEQ ID NO: 677 - protein, 29 aa, Artificial Sequence
  Synthetic peptide
  MISC_FEATURE: c-term amidation
  MOD_RES (2)..(2): Xaa is Aib
  MOD_RES (10)..(10): Acylated with a C16 fatty acyl group via acidic amino acid spacer
HXQGTFISDKSKYLDEQAAKEFIAWLMNT

SEQ ID NO: 678 - protein, 29 aa, Artificial Sequence
  Synthetic peptide
  MISC_FEATURE: c-term amidation
  MOD_RES (2)..(2): Xaa is Aib
  MOD_RES (10)..(10): Acylated with a C16 fatty acyl group via dipeptide spacer
HXQGTFISDKSKYLDEQAAKEFIAWLMNT

SEQ ID NO: 679 - protein, 29 aa, Artificial Sequence
  Synthetic peptide
  MISC_FEATURE: c-term amidation
  MOD_RES (1)..(1): Xaa is Dmia
  MOD_RES (10)..(10): Acylated with a C16 fatty acyl group via acidic amino acid spacer
  MISC_FEATURE (16)..(20): Lactam ring between side chains of amino acids at positions 16 and 20
XSQGTFTSDKSKYLDERRAKDFVQWLMNT

SEQ ID NO: 680 - protein, 29 aa, Artificial Sequence
  Synthetic peptide
  MISC_FEATURE: c-term amidation
  MOD_RES (1)..(1): Xaa is Dmia
  MOD_RES (10)..(10): Acylated with a C16 fatty acyl group via dipeptide spacer
  MISC_FEATURE (16)..(20): Lactam ring between side chains of amino acids at positions 16 and 20
XSQGTFTSDKSKYLDERRAKDFVQWLMNT

SEQ ID NO: 681 - protein, 29 aa, Artificial Sequence
  Synthetic peptide
  MISC_FEATURE: c-term amidation
  MOD_RES (1)..(1): Xaa is Dmia
  MISC_FEATURE (16)..(20): Lactam ring between side chains of amino acids at positions 16 and 20
  MOD_RES (29)..(29): Acylated with a C16 fatty acyl group via acidic amino acid spacer
XSQGTFTSDYSKYLDERRAKDFVQWLMNK

SEQ ID NO: 682 - protein, 29 aa, Artificial Sequence
  Synthetic peptide
  MISC_FEATURE: c-term amidation
  MOD_RES (1)..(1): Xaa is Dmia
  MISC_FEATURE (16)..(20): Lactam ring between side chains of amino acids at positions 16 and 20
  MOD_RES (29)..(29): Acylated with a C16 fatty acyl group via dipeptide spacer
XSQGTFTSDYSKYLDERRAKDFVQWLMNK

SEQ ID NO: 683 - protein, 29 aa, Artificial Sequence
  Synthetic peptide
  MISC_FEATURE: c-term amidation
  MOD_RES (2)..(2): Xaa is Aib
  MOD_RES (10)..(10): Acylated with a C16 fatty acyl group via dipeptide spacer
  MOD_RES (16)..(16): Xaa is Aib
HXQGTFTSDKSKYLDXRAAQDFVQWLMDT

SEQ ID NO: 684 - protein, 29 aa, Artificial Sequence
  Synthetic peptide
  MISC_FEATURE: c-term amidation
  MOD_RES (2)..(2): Xaa is Aib
  MOD_RES (10)..(10): Acylated with a C16 fatty acyl group via acidic amino acid spacer
  MOD_RES (16)..(16): Xaa is Aib
HXQGTFTSDKSKYLDXRAAQDFVQWLMDT

SEQ ID NO: 685 - protein, 29 aa, Artificial Sequence
  Synthetic Polypeptide
  MISC_FEATURE: c-term amidation
  MOD_RES (1)..(1): (Des-amino)His
  MISC_FEATURE (12)..(16): Lactam ring between side chains at positions 12 and 16
XSQGTFTSDYSKYLDERRAQDFVQWLMNT

SEQ ID NO: 686 - protein, 29 aa, Artificial Sequence
  Synthetic Polypeptide
  MISC_FEATURE: c-term amidation
  MOD_RES (1)..(1): (Des-amino)His
  MISC_FEATURE (12)..(16): Lactam ring between side chains at positions 12 and 16
XSQGTFTSDYSKYLDERRAKDFVQWLMNT

SEQ ID NO: 687 - protein, 29 aa, Artificial Sequence
  Synthetic Polypeptide
  MISC_FEATURE: c-term amidation
  MOD_RES (1)..(1): (Des-amino)His
  MISC_FEATURE (16)..(20): Lactam ring between side chains at positions 16 and 20
XSQGTFTSDYSKYLDKRRAEDFVQWLMNT

SEQ ID NO: 688 - protein, 29 aa, Artificial Sequence
  Synthetic Polypeptide
  MOD_RES (1)..(1): (Des-amino)His
  MISC_FEATURE (29)..(29): c-term amidation
XSQGTFTSDYSKYLDERAAKDFVQWLMNT

SEQ ID NO: 689 - protein, 29 aa, Artificial Sequence
  Synthetic Polypeptide
  MISC_FEATURE: c-term amidation
  MOD_RES (1)..(1): (Des-amino)His
  MISC_FEATURE (16)..(20): Lactam ring between side chains at positions 16 and 20
XSQGTFTSDYSKYLDERAAKDFVQWLMNT

SEQ ID NO: 690 - protein, 29 aa, Artificial Sequence
  Synthetic Polypeptide
  MISC_FEATURE: c-term amidation
  MOD_RES (1)..(1): (Des-amino)His
  MISC_FEATURE (12)..(16): Lactam ring between side chains at positions 12 and 16
XSQGTFTSDYSKYLDERAAQDFVQWLMNT

SEQ ID NO: 691 - protein, 29 aa, Artificial Sequence
  Synthetic Polypeptide
  MISC_FEATURE: c-term amidation
  MOD_RES (1)..(1): (Des-amino)His
  MISC_FEATURE (12)..(16): Lactam ring between side chains at positions 12 and 16
XSQGTFTSDYSKYLDERAAKDFVQWLMNT

SEQ ID NO: 692 - protein, 29 aa, Artificial Sequence
  Synthetic Polypeptide
  MISC_FEATURE: c-term amidation
  MOD_RES (1)..(1): (Des-amino)His
  MISC_FEATURE (16)..(20): Lactam ring between side chains at positions 16 and 20
XSQGTFTSDYSKYLDKRAAEDFVQWLMNT

SEQ ID NO: 693 - protein, 29 aa, Artificial Sequence
  Synthetic Polypeptide
  MISC_FEATURE: c-term amidation
  MOD_RES (1)..(1): (Des-amino)His
  MISC_FEATURE (12)..(16): Lactam ring between side chains at positions 12 and 16
XSQGTFTSDYSKYLDEQAAKEFIAWLMNT

SEQ ID NO: 694-698 - skipped (5 entries)

SEQ ID NO: 699 - protein, 29 aa, Artificial Sequence
  Glucagon analog
  MOD_RES (29)..(29): C-terminal amidation
HSQGTFTSDYSKYLDERRAQDFVQWLMNT

SEQ ID NO: 700 - protein, 31 aa, Artificial Sequence
  GLP-1 analog
HAEGTFTSDVSSYLEEQAAREFIAWLVRGRG

SEQ ID NO: 701 - protein, 29 aa, Homo sapiens
  MOD_RES (29)..(29): C-terminal amidation
HSQGTFTSDYSKYLDSRRAQDFVQWLMNT

SEQ ID NO: 702 - protein, 24 aa, Artificial Sequence
  Glucagon analog
  MOD_RES (1)..(1): N-terminal amino group replaced with hydroxy group
FTSDYSKYLDSRRAQDFVQWLMNT

SEQ ID NO: 703 - protein, 31 aa, Homo sapiens
HAEGTFTSDVSSYLEGQAAKEFIAWLVKGRG

SEQ ID NO: 704 - protein, 30 aa, Homo sapiens
  MOD_RES (30)..(30): AMIDATION
HAEGTFTSDVSSYLEGQAAKEFIAWLVKGR

SEQ ID NO: 705 - protein, 28 aa, Homo sapiens
HGEGTFTSDLSKQMEEAVRLFIEWLKNG

SEQ ID NO: 706 - protein, 37 aa, Homo sapiens
HSQGTFTSDYSKYLDSRRAQDFVQWLMDTKRNRNNIA

SEQ ID NO: 707 - protein, 42 aa, Homo sapiens
YAEGTFISDYSIAMDKIHQQDFVNWLLAQKGKKNDWKHNITQ

SEQ ID NO: 708 - protein, 33 aa, Homo sapiens
HADGSFSDEMNTILDNLAARDFINWLIQTKITD

SEQ ID NO: 709 - protein, 49 aa, Homo sapiens
YLYQWLGAPVPYPDPLEPRREVCELNPDCDELADHIGFQEAYRRFYGPV

SEQ ID NO: 710 - protein, 10 aa, Artificial Sequence
  peptide fragment representing the carboxy terminal 10 amino acids of Exendin-4
GPSSGAPPPS

SEQ ID NO: 711 - protein, 10 aa, Artificial Sequence
  peptide fragment representing the carboxy terminal 10 amino acids of Exendin-4
  MOD_RES (10)..(10): AMIDATION
GPSSGAPPPS

SEQ ID NO: 712 - protein, 11 aa, Artificial Sequence
  peptide fragment representing the carboxy terminal 10 amino acids of Exendin-4
  MOD_RES (11)..(11): Pegylation
GPSSGAPPPSC

SEQ ID NO: 713 - protein, 13 aa, Artificial Sequence
  peptide fragment representing the carboxy terminal 13 amino acids of GIP peptide
KGKKNDWKHNITQ

SEQ ID NO: 714 - protein, 8 aa, Artificial Sequence
  peptide fragment representing the carboxy terminal 8 amino acids of oxyntomodulin
KRNRNNIA

SEQ ID NO: 715 - protein, 6 aa, Artificial Sequence
  Glucagon analogue
  MOD_RES (6)..(6): C-terminal amide
HTRGTF

SEQ ID NO: 716 - protein, 6 aa, Artificial Sequence
  glucagon analogue
  MOD_RES (1)..(1): d-histidine
  MOD_RES (2)..(2): d-threonine
  MOD_RES (3)..(3): d-arginine
  MOD_RES (5)..(5): d-threonine
  MOD_RES (6)..(6): d-phenylalanine
  MOD_RES (6)..(6): C-terminal amidation
XXXGXX

SEQ ID NO: 717 - protein, 30 aa, Artificial Sequence
  glucagon analogue
  MOD_RES (24)..(24): pegylation
HAEGTFTSDVSSYLEGQAAKEFICWLVKGR

SEQ ID NO: 718 - protein, 39 aa, Heloderma suspectum
HGEGTFTSDLSKQMEEEAVRLFIEWLKNGGPSSGAPPPS

SEQ ID NO: 719 - protein, 29 aa, Homo sapiens
YADAIFTNSYRKVLGQLSARKLLQDIMSR

SEQ ID NO: 720 - protein, 28 aa, Homo sapiens
  MOD_RES (28)..(28): AMIDATION
HSDAVFTDNYTRLRKQMAVKKYLNSILN

SEQ ID NO: 721 - protein, 27 aa, Homo sapiens
HSDGIFTDSYSRYRKQMAVKKYLAAVL

SEQ ID NO: 722 - protein, 27 aa, Homo sapiens
  MOD_RES (27)..(27): AMIDATION
HADGVFTSDFSKLLGQLSAKKYLESLM

SEQ ID NO: 723 - protein, 27 aa, Homo sapiens
  MOD_RES (27)..(27): AMIDATION
HSDGTFTSELSRLREGARLQRLLQGLV

SEQ ID NO: 724 - protein, 30 aa, Artificial Sequence
  Synthetic peptide
  MOD_RES (2)..(2): Xaa is AIB
  MOD_RES (24)..(24): Cys residue linked to 40kDa PEG via maleimide
  MOD_RES (30)..(30): C-terminal amidation
HXQGTFTSDYSKYLDEQAAKEFICWLMNTN

SEQ ID NO: 725 - protein, 29 aa, Artificial Sequence
  Synthetic peptide
  MOD_RES (2)..(2): Xaa is AIB
  MISC_FEATURE (24)..(24): Covalently bound to 40K PEG via thioether
  MOD_RES (29)..(29): AMIDATION
HXEGTFTSDYSKYLDEQAAKEFICWLMNT

SEQ ID NO: 726 - protein, 31 aa, Artificial Sequence
  Synthetic peptide
  MOD_RES (1)..(1): d-lysine
  MOD_RES (2)..(2): Sarcosine (N-methyl glycine)
  MOD_RES (4)..(4): Xaa is AIB
  MOD_RES (24)..(24): Covalently bound to 40kDa PEG via thioether
  MOD_RES (31)..(31): AMIDATION
KGHXEGTFTSDYSKYLDEQAAKEFICWLMNT

SEQ ID NO: 727 - protein, 31 aa, Artificial Sequence; identical to SEQ ID NO: 726
  Synthetic peptide
  MOD_RES (1)..(1): d-lysine
  MOD_RES (2)..(2): N-hexyl-glycine
  MOD_RES (4)..(4): Xaa is AIB
  MOD_RES (24)..(24): Covalently bound to 40kDa PEG via maleimide
  MOD_RES (31)..(31): AMIDATION

SEQ ID NO: 728 - protein, 31 aa, Artificial Sequence
  Synthetic peptide
  MOD_RES (1)..(1): d-lysine
  MOD_RES (2)..(2): N-methyl phenylalanine
  MOD_RES (4)..(4): Xaa is AIB
  MOD_RES (24)..(24): Covalently bound to 40kDa PEG via thioether
  MOD_RES (31)..(31): AMIDATION
KFHXEGTFTSDYSKYLDEQAAKEFICWLMNT

SEQ ID NO: 729 - protein, 29 aa, Artificial Sequence
  Synthetic peptide
  MOD_RES (2)..(2): Xaa is AIB
  MOD_RES (24)..(24): Covalently bound to 40 kDa PEG via maleimide
HXEGTFTSDYSKYLDEQAAKEFICWLMNT

SEQ ID NO: 730 - protein, 29 aa, Artificial Sequence
  Synthetic peptide
  MOD_RES (1)..(1): Xaa is DMIA
  MISC_FEATURE (16)..(20): Lactam ring between side chains of amino acids
  MOD_RES (24)..(24): Covalently bound to 40kDa PEG via maleimide
  MOD_RES (29)..(29): C-terminal amidation
XSQGTFTSDKSKYLDERRAKDFVCWLMNT

SEQ ID NO: 731 - protein, 30 aa, Artificial Sequence
  Synthetic peptide
  MOD_RES (30)..(30): C-terminal amidation
HSQGTFTSDYSKYLDEQAAKEFIAWLMNTN

SEQ ID NO: 732 - protein, 8 aa, Artificial Sequence
  Synthetic peptide
  MOD_RES (1)..(1): Xaa is Phe, hydroxyl-Phe, Gly, hydroxyl-Gly, Ala, Cys, Ser, Lys, Glu, dehydro-Val, Pro, d-Pro, AIB, 1-aminocyclohexanecarboxylic acid, 1-aminocyclopropanecarboxylic acid, N-Me-AIB, alpha-alpha-diethyl-Gly, hydroxyl-AIB, or d-Lys
  MOD_RES (2)..(2): Xaa is Pro, d-Pro, N-methyl-Gly, N-hexyl-Gly, Azetidine-2-carboxylic acid, N-methyl-Ala, or N-methyl-Phe
  MOD_RES (3)..(3): Xaa is His, d-His, Ala, or N-methyl-His
  MOD_RES (8)..(8): C-terminal amidation
XXXSRGTF

SEQ ID NO: 733 - protein, 31 aa, Artificial Sequence
  Synthetic peptide
  MOD_RES (1)..(1): d-Lys
  MOD_RES (2)..(2): Xaa is Sar
  MOD_RES (4)..(4): Xaa is AIB
  MOD_RES (26)..(26): Covalently bound to PEG via 40kDa maleimide
KXHXEGTFTSDYSKYLDEQAAKEFICWLMNT

SEQ ID NO: 734 - protein, 32 aa, Artificial Sequence
  Synthetic peptide
  MOD_RES (1)..(1): d-Lys
  MOD_RES (2)..(2): Xaa is Sar
  MOD_RES (4)..(4): Xaa is AIB
  MOD_RES (26)..(26): Cys residue linked to 40kDa PEG via maleimide
  MOD_RES (32)..(32): C-terminal amidation
KXHXQGTFTSDYSKYLDEQAAKEFICWLMNTN

SEQ ID NO: 735 - protein, 31 aa, Artificial Sequence
  Synthetic peptide
  MOD_RES (1)..(1): d-Lys
  MOD_RES (2)..(2): Xaa is Sar
  MOD_RES (3)..(3): Xaa is DMIA
  MISC_FEATURE (18)..(22): Lactam ring between side chains of amino acids
  MOD_RES (26)..(26): Covalently bound to 40kDa PEG via maleimide
  MOD_RES (31)..(31): C-terminal amidation
KXXSQGTFTSDKSKYLDERRAKDFVCWLMNT

SEQ ID NO: 736 - protein, 31 aa, Artificial Sequence; identical to SEQ ID NO: 726
  Synthetic peptide
  MOD_RES (1)..(1): d-Lys
  MOD_RES (2)..(2): N-hexyl-Gly
  MOD_RES (4)..(4): Xaa is AIB
  MISC_FEATURE (26)..(26): Covalently bound to 40K PEG via thioether
  MOD_RES (31)..(31): AMIDATION

SEQ ID NO: 737 - protein, 32 aa, Artificial Sequence
  Synthetic peptide
  MOD_RES (1)..(1): d-Lys
  MOD_RES (2)..(2): N-hexyl-Gly
  MOD_RES (4)..(4): Xaa is AIB
  MOD_RES (26)..(26): Cys residue linked to 40kDa PEG via maleimide
  MOD_RES (32)..(32): C-terminal amidation
KGHXQGTFTSDYSKYLDEQAAKEFICWLMNTN

SEQ ID NO: 738 - protein, 31 aa, Artificial Sequence
  Synthetic peptide
  MOD_RES (1)..(1): d-Lys
  MOD_RES (2)..(2): N-hexyl-Gly
  MOD_RES (3)..(3): Xaa is DMIA
  MISC_FEATURE (18)..(22): Lactam ring between side chains of amino acids
  MOD_RES (26)..(26): Covalently bound to 40kDa PEG via maleimide
  MOD_RES (31)..(31): C-terminal amidation
KGXSQGTFTSDKSKYLDERRAKDFVCWLMNT

SEQ ID NO: 739 - protein, 31 aa, Artificial Sequence; identical to SEQ ID NO: 728
  Synthetic peptide
  MOD_RES (1)..(1): d-Lys
  MOD_RES (2)..(2): N-methyl-Phe
  MOD_RES (4)..(4): Xaa is AIB
  MOD_RES (26)..(26): Covalently bound to 40kDa PEG via maleimide

SEQ ID NO: 740 - protein, 32 aa, Artificial Sequence
  Synthetic peptide
  MOD_RES (1)..(1): d-Lys
  MOD_RES (2)..(2): N-methyl-Phe
  MOD_RES (4)..(4): Xaa is AIB
  MOD_RES (26)..(26): Cys residue linked to 40kDa PEG via maleimide
  MOD_RES (32)..(32): C-terminal amidation
KFHXQGTFTSDYSKYLDEQAAKEFICWLMNTN

SEQ ID NO: 741 - protein, 31 aa, Artificial Sequence
  Synthetic peptide
  MOD_RES (1)..(1): d-Lys
  MOD_RES (2)..(2): N-methyl-Phe
  MOD_RES (3)..(3): Xaa is DMIA
  MISC_FEATURE (18)..(22): Lactam ring between side chains of amino acids
  MOD_RES (26)..(26): Covalently bound to 40kDa PEG via maleimide
  MOD_RES (31)..(31): C-terminal amidation
KFXSQGTFTSDKSKYLDERRAKDFVCWLMNT

SEQ ID NO: 742 - protein, 29 aa, Artificial Sequence
  Synthetic peptide
  MOD_RES (2)..(2): Xaa is AIB
  MOD_RES (24)..(24): Pegylated
  MOD_RES (29)..(29): C-terminal amidation
HXEGTFTSDYSKYLDEQAAKEFICWLMNT

SEQ ID NO: 743 - protein, 29 aa, Artificial Sequence
  Synthetic peptide
  MOD_RES (2)..(2): Xaa is AIB
  MOD_RES (10)..(10): Acylated with fatty acyl group
  MOD_RES (16)..(16): Xaa is AIB
  MOD_RES (29)..(29): C-terminal amidation
HXQGTFTSDKSKYLDXRAAQDFVQWLMDT

SEQ ID NO: 744 - protein, 40 aa, Artificial Sequence
  Synthetic peptide
  MOD_RES (2)..(2): Xaa is AIB
  MOD_RES (40)..(40): C-terminal amidation
HXEGTFTSDVSSYLEEQAAKEFIAWLVKGGPSSGAPPPSK

SEQ ID NO: 745 - protein, 29 aa, Artificial Sequence
  Synthetic peptide
  MOD_RES (1)..(1): Xaa is Dmia
  MISC_FEATURE (16)..(20): Lactam ring between side chains of amino acids at positions 16 and 20
  MOD_RES (24)..(24): Pegylated
  MOD_RES (29)..(29): C-terminal amidation
XSQGTFTSDYSKYLDERRAKDFVCWLMNT

SEQ ID NO: 746 - protein, 29 aa, Artificial Sequence
  Synthetic peptide
  MOD_RES (2)..(2): d-Ser
  MISC_FEATURE (16)..(20): Lactam ring between side chains of amino acids at positions 16 and 20
  MOD_RES (24)..(24): Pegylated
  MOD_RES (29)..(29): C-terminal amidation
HSQGTFTSDYSLYLDERAAKDFVCWLLDT

SEQ ID NO: 747 - protein, 29 aa, Artificial Sequence
  Synthetic peptide
  MOD_RES (2)..(2): Xaa is AIB
  MOD_RES (16)..(16): Xaa is AIB
  MOD_RES (20)..(20): Xaa is AIB
  MOD_RES (24)..(24): Pegylated
  MOD_RES (29)..(29): C-terminal amidation
HXQGTFTSDYSKYLDXKRAXEFVCWLLDT

SEQ ID NO: 748 - protein, 29 aa, Artificial Sequence
  Synthetic peptide
  MOD_RES (2)..(2): Xaa is AIB
  MOD_RES (10)..(10): Acylated with fatty acyl group via dipeptide spacer
  MOD_RES (16)..(16): Xaa is AIB
  MOD_RES (29)..(29): C-terminal amidation
HXQGTFTSDKSKYLDXRAAQDFVQWLMDT

SEQ ID NO: 749 - protein, 29 aa, Artificial Sequence
  Synthetic peptide
  MOD_RES (2)..(2): Xaa is AIB
  MOD_RES (10)..(10): Acylated with fatty acyl group via acidic amino acid spacer
  MOD_RES (16)..(16): Xaa is AIB
  MOD_RES (29)..(29): C-terminal amidation
HXQGTFTSDKSKYLDXRAAQDFVQWLMDT

SEQ ID NO: 750 - protein, 29 aa, Artificial Sequence
  Synthetic peptide
  MOD_RES (2)..(2): d-Ser
  MOD_RES (10)..(10): Acylated with fatty acyl group via dipeptide spacer
  MOD_RES (16)..(16): Xaa is AIB
  MOD_RES (29)..(29): C-terminal amidation
HSQGTFTSDKSKYLDXRAAQDFVQWLMDT

SEQ ID NO: 751 - protein, 29 aa, Artificial Sequence
  Synthetic peptide
  MOD_RES (2)..(2): Xaa is AIB
  MOD_RES (10)..(10): Acylated with fatty acyl group via dipeptide spacer
  MOD_RES (16)..(16): Xaa is AIB
  MOD_RES (29)..(29): C-terminal amidation
HXQGTFTSDKSKYLDXRAAQDFVQWLLDT

SEQ ID NO: 752 - protein, 29 aa, Artificial Sequence
  Synthetic peptide
  MOD_RES (2)..(2): Xaa is AIB
  MOD_RES (10)..(10): Acylated with fatty acyl group via dipeptide spacer
  MOD_RES (29)..(29): C-terminal amidation
HXQGTFTSDKSKYLDERAAQDFVQWLMDT

SEQ ID NO: 753 - protein, 29 aa, Artificial Sequence
  Synthetic peptide
  MOD_RES (2)..(2): Xaa is AIB
  MOD_RES (10)..(10): Acylated with fatty acyl group via dipeptide spacer
  MOD_RES (16)..(16): Xaa is AIB
  MOD_RES (29)..(29): C-terminal amidation
HXQGTFTSDKSKYLEXRAAQDFVQWLMDT

SEQ ID NO: 754 - protein, 29 aa, Artificial Sequence
  Synthetic peptide
  MOD_RES (2)..(2): d-Ser
  MOD_RES (10)..(10): Acylated with fatty acyl group via acidic amino acid spacer
  MOD_RES (29)..(29): C-terminal amidation
HSQGTFTSDKSKYLDERAAQDFVQWLLDT

SEQ ID NO: 755 - protein, 29 aa, Artificial Sequence
  Synthetic peptide
  MOD_RES (2)..(2): Xaa is AIB
  MOD_RES (10)..(10): Acylated with fatty acyl group via acidic amino acid spacer
  MOD_RES (29)..(29): C-terminal amidation
HXQGTFTSDKSKYLDEQAAKEFIAWLLDT

SEQ ID NO: 756 - protein, 40 aa, Artificial Sequence
  Synthetic polypeptide
  MOD_RES (2)..(2): Xaa is Aib
  MOD_RES (20)..(20): Xaa is Aib
  MOD_RES (40)..(40): C-terminal amidation
YXEGTFTSDYSIYLDKQAAXEFVNWLLAGGPSSGAPPPSK

SEQ ID NO: 757 - protein, 39 aa, Artificial Sequence
  Synthetic polypeptide
  MOD_RES (2)..(2): Xaa is Aib
  MOD_RES (20)..(20): Xaa is Aib
  MOD_RES (39)..(39): C-terminal amidation
YXEGTFTSDYSIYLDKQAAXEFVNWLLAGGPSSGAPPPS

SEQ ID NO: 758 - protein, 39 aa, Artificial Sequence
  Synthetic polypeptide
  MOD_RES (2)..(2): Xaa is Aib
  MOD_RES (10)..(10): Acylated with fatty acyl group via dipeptide spacer
  MOD_RES (20)..(20): Xaa is AIB
  MOD_RES (39)..(39): C-terminal amidation
YXEGTFTSDKSIYLDKQAAXEFVNWLLAGGPSSGAPPPS

SEQ ID NO: 759 - protein, 40 aa, Artificial Sequence
  Synthetic polypeptide
  MOD_RES (2)..(2): Xaa is AIB
  MOD_RES (20)..(20): Xaa is AIB
  MOD_RES (24)..(24): Pegylated
  MOD_RES (40)..(40): C-terminal amidation
YXEGTFTSDYSIYLDKQAAXEFVCWLLAGGPSSGAPPPSK

SEQ ID NO: 760 - protein, 40 aa, Artificial Sequence
  Synthetic polypeptide
  MOD_RES (2)..(2): Xaa is AIB
  MOD_RES (20)..(20): Xaa is AIB
  MOD_RES (40)..(40): Pegylated
  MOD_RES (40)..(40): C-terminal amidation
YXEGTFTSDYSIYLDKQAAXEFVNWLLAGGPSSGAPPPSC

SEQ ID NO: 761 - protein, 40 aa, Artificial sequence
  Synthetic polypeptide
  MOD_RES (2)..(2): Xaa is AIB
  MISC_FEATURE (16)..(20): Lactam bridge between side chains of amino acids at positions 16 and 20
  MOD_RES (40)..(40): Pegylated
  MOD_RES (40)..(40): C-terminal amidation
YXEGTFTSDYSIYLDEQAAKEFVNWLLAGGPSSGAPPPSC

SEQ ID NO: 762 - protein, 40 aa, Artificial Sequence; identical to SEQ ID NO: 760
  Synthetic polypeptide
  MOD_RES (2)..(2): Xaa is AIB
  MOD_RES (20)..(20): Xaa is AIB
  MOD_RES (40)..(40): Pegylated
  MOD_RES (40)..(40): C-terminal amidation

SEQ ID NO: 763 - protein, 40 aa, Artificial Sequence; identical to SEQ ID NO: 759
  Synthetic polypeptide
  MOD_RES (2)..(2): Xaa is AIB
  MOD_RES (20)..(20): Xaa is AIB
  MOD_RES (24)..(24): Pegylated
  MOD_RES (40)..(40): C-terminal amidation

SEQ ID NO: 764 - protein, 40 aa, Artificial Sequence; identical to SEQ ID NO: 756
  Synthetic polypeptide
  MOD_RES (2)..(2): Xaa is AIB
  MOD_RES (20)..(20): Xaa is AIB
  MOD_RES (40)..(40): Acylated with fatty acyl group
  MOD_RES (40)..(40): C-terminal amidation

SEQ ID NO: 765 - protein, 40 aa, Artificial Sequence
  Synthetic polypeptide
  MOD_RES (2)..(2): Xaa is AIB
  MOD_RES (10)..(10): Acylated with fatty acyl group via dipeptide spacer
  MOD_RES (20)..(20): Xaa is AIB
  MOD_RES (40)..(40): C-terminal amidation
YXEGTFTSDKSIYLDKQAAXEFVNWLLAGGPSSGAPPPSK

SEQ ID NO: 766 - protein, 40 aa, Artificial Sequence
  Synthetic polypeptide
  MOD_RES (2)..(2): Xaa is AIB
  MOD_RES (20)..(20): Xaa is AIB
  MOD_RES (24)..(24): Pegylated
  MOD_RES (40)..(40): C-terminal amidation
YXQGTFTSDYSIYLDKQAAXEFVCWLLAGGPSSGAPPPSK

SEQ ID NO: 767 - protein, 29 aa, Artificial Sequence
  Synthetic peptide
  MOD_RES (3)..(3): Xaa is Acetyldiaminobutanoic acid
  MOD_RES (16)..(16): Xaa is AIB
  MOD_RES (29)..(29): C-terminal amidation
HSXGTFTSDYSKYLDXRRAADFVAWLLDE

SEQ ID NO: 768 - protein, 29 aa, Artificial Sequence
  Synthetic peptide
  MOD_RES (3)..(3): Xaa is Acetyldiaminobutanoic acid
  MOD_RES (16)..(16): Xaa is AIB
  MOD_RES (29)..(29): C-terminal amidation
HSXGTFTSDYSKYLDXERAADFVAWLLDE

SEQ ID NO: 769 - protein, 31 aa, Artificial Sequence
  Synthetic peptide
  MOD_RES (1)..(1): Xaa is AIB, d-Lys, d-Cys, d-Ala
  MOD_RES (2)..(2): Xaa is Gly(N-Hexyl), Gly(N-Methyl), Phe(N-Methyl)
  MOD_RES (4)..(4): Xaa is AIB
  MOD_RES (26)..(26): Pegylated
  MOD_RES (31)..(31): C-terminal amidation
XXHXEGTFTSDYSKYLDEQAAKEFICWLMNT

SEQ ID NO: 770 - protein, 31 aa, Artificial Sequence
  Synthetic peptide
  MOD_RES (1)..(1): Xaa is AIB, d-Lys, d-Cys, d-Ala
  MOD_RES (2)..(2): Xaa is Gly(N-Hexyl), Gly(N-Methyl), Phe(N-Methyl)
  MOD_RES (4)..(4): Xaa is AIB
  MOD_RES (12)..(12): Acylated with fatty acyl group
  MOD_RES (18)..(18): Xaa is AIB
  MOD_RES (31)..(31): C-terminal amidation
XXHXQGTFTSDKSKYLDXRAAQDFVQWLMDT

SEQ ID NO: 771 - protein, 42 aa, Artificial Sequence
  Synthetic peptide
  MOD_RES (1)..(1): Xaa is AIB, d-Lys, d-Cys, d-Ala
  MOD_RES (2)..(2): Xaa is Gly(N-Hexyl), Gly(N-Methyl), Phe(N-Methyl)
  MOD_RES (4)..(4): Xaa is AIB
  MOD_RES (42)..(42): C-terminal amidation
XXHXEGTFTSDVSSYLEEQAAKEFIAWLVKGGPSSGAPPPSK

SEQ ID NO: 772 - protein, 31 aa, Artificial Sequence
  Synthetic peptide
  MOD_RES (1)..(1): Xaa is AIB, d-Lys, d-Cys, d-Ala
  MOD_RES (2)..(2): Xaa is Gly(N-Hexyl), Gly(N-Methyl), Phe(N-Methyl)
  MOD_RES (4)..(4): d-Ser
  MISC_FEATURE (18)..(22): Lactam ring between side chains of amino acids at positions 18 and 22
  MOD_RES (26)..(26): Pegylated
  MOD_RES (31)..(31): C-terminal amidation
XXHSQGTFTSDYSLYLDERAAKDFVCWLLDT

SEQ ID NO: 773 - protein, 31 aa, Artificial Sequence
  Synthetic peptide
  MOD_RES (1)..(1): Xaa is AIB, d-Lys, d-Cys, d-Ala
  MOD_RES (2)..(2): Xaa is Gly(N-Hexyl), Gly(N-Methyl), Phe(N-Methyl)
  MOD_RES (4)..(4): Xaa is AIB
  MOD_RES (18)..(18): Xaa is AIB
  MOD_RES (22)..(22): Xaa is AIB
  MOD_RES (26)..(26): Pegylated
  MOD_RES (31)..(31): C-terminal amidation
XXHXQGTFTSDYSKYLDXKRAXEFVCWLLDT

SEQ ID NO: 774 - protein, 31 aa, Artificial Sequence; identical to SEQ ID NO: 770
  Synthetic peptide
  MOD_RES (1)..(1): Xaa is AIB, d-Lys, d-Cys, d-Ala
  MOD_RES (2)..(2): Xaa is Gly(N-Hexyl), Gly(N-Methyl), Phe(N-Methyl)
  MOD_RES (4)..(4): Xaa is AIB
  MOD_RES (12)..(12): Acylated with fatty acyl group via dipeptide spacer
  MOD_RES (18)..(18): Xaa is AIB
  MOD_RES (31)..(31): C-terminal amidation

SEQ ID NO: 775 - protein, 31 aa, Artificial Sequence; identical to SEQ ID NO: 770
  Synthetic peptide
  MOD_RES (1)..(1): Xaa is AIB, d-Cys, d-Lys, d-Ala
  MOD_RES (2)..(2): Xaa is Gly(N-Hexyl), Gly(N-Methyl), Phe(N-Methyl)
  MOD_RES (4)..(4): Xaa is AIB
  MOD_RES (12)..(12): Acylated with fatty acyl group via acidic amino acid spacer
  MOD_RES (18)..(18): Xaa is AIB
  MOD_RES (31)..(31): C-terminal amidation

SEQ ID NO: 776 - protein, 31 aa, Artificial Sequence
  Synthetic peptide
  MOD_RES (1)..(1): Xaa is AIB, d-Lys, d-Cys, d-Ala
  MOD_RES (2)..(2): Xaa is Gly(N-Hexyl), Gly(N-Methyl), Phe(N-Methyl)
  MOD_RES (4)..(4): d-Ser
  MOD_RES (12)..(12): Acylated with fatty acyl group via dipeptide spacer
  MOD_RES (18)..(18): Xaa is AIB
  MOD_RES (31)..(31): C-terminal amidation
XXHSQGTFTSDKSKYLDXRAAQDFVQWLMDT

SEQ ID NO: 777 - protein, 31 aa, Artificial Sequence
  Synthetic peptide
  MOD_RES (1)..(1): Xaa is AIB, d-Lys, d-Cys, d-Ala
  MOD_RES (2)..(2): Xaa is Gly(N-Hexyl), Gly(N-Methyl), Phe(N-Methyl)
  MOD_RES (4)..(4): Xaa is AIB
  MOD_RES (12)..(12): Acylated with fatty acyl group via dipeptide spacer
  MOD_RES (18)..(18): Xaa is AIB
  MOD_RES (31)..(31): C-terminal amidation
XXHXQGTFTSDKSKYLDXRAAQDFVQWLLDT

SEQ ID NO: 778 - protein, 31 aa, Artificial Sequence
  Synthetic peptide
  MOD_RES (1)..(1): Xaa is AIB, d-Lys, d-Cys, d-Ala
  MOD_RES (2)..(2): Xaa is Gly(N-Hexyl), Gly(N-Methyl), Phe(N-Methyl)
  MOD_RES (4)..(4): Xaa is AIB
  MOD_RES (12)..(12): Acylated with fatty acyl group via dipeptide spacer
  MOD_RES (31)..(31): C-terminal amidation
XXHXQGTFTSDKSKYLDERAAQDFVQWLMDT

SEQ ID NO: 779 - protein, 31 aa, Artificial Sequence
  Synthetic peptide
  MOD_RES (1)..(1): Xaa is AIB, d-Lys, d-Cys, d-Ala
  MOD_RES (2)..(2): Xaa is Gly(N-Hexyl), Gly(N-Methyl), Phe(N-Methyl)
  MOD_RES (4)..(4): Xaa is AIB
  MOD_RES (12)..(12): Acylated with fatty acyl group via dipeptide spacer
  MOD_RES (18)..(18): Xaa is AIB
  MOD_RES (31)..(31): C-terminal amidation
XXHXQGTFTSDKSKYLEXRAAQDFVQWLMDT

SEQ ID NO: 780 - protein, 31 aa, Artificial Sequence
  Synthetic peptide
  MOD_RES (1)..(1): Xaa is AIB, d-Lys, d-Cys, d-Ala
  MOD_RES (2)..(2): Xaa is Gly(N-Hexyl), Gly(N-Methyl), Phe(N-Methyl)
  MOD_RES (4)..(4): d-Ser
  MOD_RES (12)..(12): Acylated with fatty acyl group via acidic amino acid spacer
  MOD_RES (31)..(31): C-terminal amidation
XXHSQGTFTSDKSKYLDERAAQDFVQWLLDT

SEQ ID NO: 781 - protein, 31 aa, Artificial Sequence
  Synthetic peptide
  MOD_RES (1)..(1): Xaa is AIB, d-Lys, d-Cys, d-Ala
  MOD_RES (2)..(2): Xaa is Gly(N-Hexyl), Gly(N-Methyl), Phe(N-Methyl)
  MOD_RES (4)..(4): Xaa is AIB
  MOD_RES (12)..(12): Acylated with fatty acyl group via acidic amino acid spacer
  MOD_RES (31)..(31): C-terminal amidation
XXHXQGTFTSDKSKYLDEQAAKEFIAWLLDT

SEQ ID NO: 782 - protein, 42 aa, Artificial Sequence
  Synthetic polypeptide
  MOD_RES (1)..(1): Xaa is AIB, d-Lys, d-Cys, d-Ala
  MOD_RES (2)..(2): Xaa is Gly(N-Hexyl), Gly(N-Methyl), Phe(N-Methyl)
  MOD_RES (4)..(4): Xaa is Aib
  MOD_RES (22)..(22): Xaa is Aib
  MOD_RES (42)..(42): C-terminal amidation
XXYXEGTFTSDYSIYLDKQAAXEFVNWLLAGGPSSGAPPPSK

SEQ ID NO: 783 - protein, 41 aa, Artificial Sequence
  Synthetic polypeptide
  MOD_RES (1)..(1): Xaa is AIB, d-Lys, d-Cys, d-Ala
  MOD_RES (2)..(2): Xaa is Gly(N-Hexyl), Gly(N-Methyl), Phe(N-Methyl)
  MOD_RES (4)..(4): Xaa is Aib
  MOD_RES (22)..(22): Xaa is Aib
  MOD_RES (41)..(41): C-terminal amidation
XXYXEGTFTSDYSIYLDKQAAXEFVNWLLAGGPSSGAPPPS

SEQ ID NO: 784 - protein, 41 aa, Artificial Sequence
  Synthetic polypeptide
  MOD_RES (1)..(1): Xaa is AIB, d-Lys, d-Cys, d-Ala
  MOD_RES (2)..(2): Xaa is Gly(N-Hexyl), Gly(N-Methyl), Phe(N-Methyl)
  MOD_RES (4)..(4): Xaa is Aib
  MOD_RES (12)..(12): Acylated with fatty acyl group via dipeptide spacer
  MOD_RES (22)..(22): Xaa is AIB
  MOD_RES (41)..(41): C-terminal amidation
XXYXEGTFTSDKSIYLDKQAAXEFVNWLLAGGPSSGAPPPS

SEQ ID NO: 785 - protein, 42 aa, Artificial Sequence
  Synthetic polypeptide
  MOD_RES (1)..(1): Xaa is AIB, d-Lys, d-Cys, d-Ala
  MOD_RES (2)..(2): Xaa is Gly(N-Hexyl), Gly(N-Methyl), Phe(N-Methyl)
  MOD_RES (4)..(4): Xaa is AIB
  MOD_RES (22)..(22): Xaa is AIB
  MOD_RES (26)..(26): Pegylated
  MOD_RES (42)..(42): C-terminal amidation
XXYXEGTFTSDYSIYLDKQAAXEFVCWLLAGGPSSGAPPPSK

SEQ ID NO: 786 - protein, 42 aa, Artificial Sequence
  Synthetic polypeptide
  MOD_RES (1)..(1): Xaa is AIB, d-Lys, d-Cys, d-Ala
  MOD_RES (2)..(2): Xaa is Gly(N-Hexyl), Gly(N-Methyl), Phe(N-Methyl)
  MOD_RES (4)..(4): Xaa is AIB
  MOD_RES (22)..(22): Xaa is AIB
  MOD_RES (42)..(42): Pegylated
  MOD_RES (42)..(42): C-terminal amidation
XXYXEGTFTSDYSIYLDKQAAXEFVNWLLAGGPSSGAPPPSC

SEQ ID NO: 787 - protein, 42 aa, Artificial sequence
  Synthetic polypeptide
  MOD_RES (1)..(1): Xaa is AIB, d-Lys, d-Cys, d-Ala
  MOD_RES (2)..(2): Xaa is Gly(N-Hexyl), Gly(N-Methyl), Phe(N-Methyl)
  MOD_RES (4)..(4): Xaa is AIB
  MISC_FEATURE (18)..(22): Lactam bridge between side chains of amino acids at positions 18 and 22
  MOD_RES (42)..(42): Pegylated
  MOD_RES (42)..(42): C-terminal amidation
XXYXEGTFTSDYSIYLDEQAAKEFVNWLLAGGPSSGAPPPSC

SEQ ID NO: 788 - protein, 42 aa, Artificial Sequence; identical to SEQ ID NO: 786
  Synthetic polypeptide
  MOD_RES (1)..(1): Xaa is AIB, d-Lys, d-Cys, d-Ala
  MOD_RES (2)..(2): Xaa is Gly(N-Hexyl), Gly(N-Methyl), Phe(N-Methyl)
  MOD_RES (4)..(4): Xaa is AIB
  MOD_RES (22)..(22): Xaa is AIB
  MOD_RES (42)..(42): Pegylated
  MOD_RES (42)..(42): C-terminal amidation

SEQ ID NO: 789 - protein, 42 aa, Artificial Sequence; identical to SEQ ID NO: 785
  Synthetic polypeptide
  MOD_RES (1)..(1): Xaa is AIB, d-Lys, d-Cys, d-Ala
  MOD_RES (2)..(2): Xaa is Gly(N-Hexyl), Gly(N-Methyl), Phe(N-Methyl)
  MOD_RES (4)..(4): Xaa is AIB
  MOD_RES (22)..(22): Xaa is AIB
  MOD_RES (26)..(26): Pegylated
  MOD_RES (42)..(42): C-terminal amidation

SEQ ID NO: 790 - protein, 42 aa, Artificial Sequence; identical to SEQ ID NO: 782
  Synthetic polypeptide
  MOD_RES (1)..(1): Xaa is AIB, d-Lys, d-Cys, d-Ala
  MOD_RES (2)..(2): Xaa is Gly(N-Hexyl), Gly(N-Methyl), Phe(N-Methyl)
  MOD_RES (4)..(4): Xaa is AIB
  MOD_RES (22)..(22): Xaa is AIB
  MOD_RES (42)..(42): Acylated with fatty acyl group
  MOD_RES (42)..(42): C-terminal amidation

SEQ ID NO: 791 - protein, 42 aa, Artificial Sequence
  Synthetic polypeptide
  MOD_RES (1)..(1): Xaa is AIB, d-Lys, d-Cys, d-Ala
  MOD_RES (2)..(2): Xaa is Gly(N-Hexyl), Gly(N-Methyl), Phe(N-Methyl)
  MOD_RES (4)..(4): Xaa is AIB
  MOD_RES (12)..(12): Acylated with fatty acyl group via dipeptide spacer
  MOD_RES (22)..(22): Xaa is AIB
  MOD_RES (42)..(42): C-terminal amidation
XXYXEGTFTSDKSIYLDKQAAXEFVNWLLAGGPSSGAPPPSK

SEQ ID NO: 792 - protein, 42 aa, Artificial Sequence
  Synthetic polypeptide
  MOD_RES (1)..(1): Xaa is AIB, d-Lys, d-Cys, d-Ala
  MOD_RES (2)..(2): Xaa is Gly(N-Hexyl), Gly(N-Methyl), Phe(N-Methyl)
  MOD_RES (4)..(4): Xaa is AIB
  MOD_RES (22)..(22): Xaa is AIB
  MOD_RES (26)..(26): Pegylated
  MOD_RES (42)..(42): C-terminal amidation
XXYXQGTFTSDYSIYLDKQAAXEFVCWLLAGGPSSGAPPPSK

SEQ ID NO: 793 - protein, 31 aa, Artificial Sequence
  Synthetic peptide
  MOD_RES (1)..(1): Xaa is AIB, d-Lys, d-Cys, d-Ala
  MOD_RES (2)..(2): Xaa is Gly(N-Hexyl), Gly(N-Methyl), Phe(N-Methyl)
  MOD_RES (5)..(5): Xaa is Acetyldiaminobutanoic acid
  MOD_RES (18)..(18): Xaa is AIB
  MOD_RES (31)..(31): C-terminal amidation
XXHSXGTFTSDYSKYLDXRRAADFVAWLLDE

SEQ ID NO: 794 - protein, 31 aa, Artificial Sequence
  Synthetic peptide
  MOD_RES (1)..(1): Xaa is AIB, d-Lys, d-Cys, d-Ala
  MOD_RES (2)..(2): Xaa is Gly(N-Hexyl), Gly(N-Methyl), Phe(N-Methyl)
  MOD_RES (5)..(5): Xaa is Acetyldiaminobutanoic acid
  MOD_RES (18)..(18): Xaa is AIB
  MOD_RES (31)..(31): C-terminal amidation
XXHSXGTFTSDYSKYLDXERAADFVAWLLDE

SEQ ID NO: 795-800 - skipped (6 entries)

SEQ ID NO: 801 - protein, 29 aa, Homo sapiens
HSQGTFTSDYSKYLDSRRAQDFVQWLMNT

SEQ ID NO: 802 - protein, 29 aa, Artificial Sequence
  Glucagon analogue
  MOD_RES (16)..(16): Xaa is Ser, Cys, Orn, homocysteine or acetyl phenyalanine
  MOD_RES (27)..(27): Xaa is Met, Leu or Nle
HSQGTFTSDYSKYLDXRRAQDFVQWLXDT

SEQ ID NO: 803 - protein, 29 aa, Artificial Sequence
  Glucagon analogue
  MOD_RES (17)..(17): Xaa is Arg, Cys, Orn, homocysteine or acetyl phenyalanine
  MOD_RES (27)..(27): Xaa is Met, Leu or Nle
HSQGTFTSDYSKYLDSXRAQDFVQWLXDT

SEQ ID NO: 804 - protein, 29 aa, Artificial Sequence
  Glucagon analogue
  MOD_RES (21)..(21): Xaa is Asp, Cys, Orn, homocysteine or acetyl phenylalanine
  MOD_RES (27)..(27): Xaa is Met, Leu or Nle
HSQGTFTSDYSKYLDSRRAQXFVQWLXDT

SEQ ID NO: 805 - protein, 29 aa, Artificial Sequence
  Synthetic peptide
  MOD_RES (24)..(24): Xaa is Gln, Cys, Orn, homocysteine or acetyl phenylalanine
  MOD_RES (27)..(27): Xaa is Met, Leu or Nle
HSQGTFTSDYSKYLDSRRAQDFVXWLXDT

SEQ ID NO: 806 - protein, 29 aa, Artificial Sequence
  Glucagon analogue
  MOD_RES (21)..(21): Xaa is Asp, Cys, Orn, homocysteine or acetyl phenyalanine
  MOD_RES (24)..(24): Xaa is Gln, Cys, Orn, homocysteine or acetyl phenyalanine
  MOD_RES (27)..(27): Xaa is Met, Leu or Nle
HSQGTFTSDYSKYLDSRRAQXFVXWLXDT

SEQ ID NO: 807 - protein, 29 aa, Artificial Sequence
  Glucagon analogue
  MOD_RES (27)..(27): Xaa is Met, Leu or Nle
  MOD_RES (28)..(28): Xaa is Lys, Arg, His, Asp, Glu, cysteic acid or homocysteic acid
  MOD_RES (29)..(29): Xaa is Thr, Lys, Arg, His, Asp, Glu, cysteic acid or homocysteic acid
HSQGTFTSDYSKYLDSRRAQDFVQWLXXX

SEQ ID NO: 808 - protein, 29 aa, Artificial Sequence
  Glucagon analogue
  MOD_RES (27)..(27): Xaa is Met, Leu or Nle
  MOD_RES (28)..(28): Xaa is Asp or Glu
  MOD_RES (29)..(29): Xaa is Thr, Asp or Glu
HSQGTFTSDYSKYLDSRRAQDFVQWLXXX

SEQ ID NO: 809 - protein, 29 aa, Artificial Sequence
  Glucagon analogue
  MOD_RES (27)..(27): Xaa is Met, Leu or Nle
  MOD_RES (29)..(29): Xaa is Asp or Glu
HSQGTFTSDYSKYLDSRRAQDFVQWLXNX

SEQ ID NO: 810 - protein, 29 aa, Artificial Sequence
  Synthetic peptide
  MOD_RES (27)..(27): Xaa is Met, Leu or Nle
HSQGTFTSDYSKYLDSRRAQDFVQWLXDT

SEQ ID NO: 811 - protein, 29 aa, Artificial Sequence
  Glucagon analogue
HSQGTFTSDYSKYLDSRRAQDFVQWLMDT

SEQ ID NO: 812 - protein, 29 aa, Artificial Sequence
  Glucagon analogue
  MOD_RES (29)..(29): Xaa is Lys, Arg or His
HSQGTFTSDYSKYLDSRRAQDFVQWLMNX

SEQ ID NO: 813 - protein, 29 aa, Artificial Sequence
  Glucagon analogue
HSQGTFTSDYSKYLESRRAQDFVQWLMDT

SEQ ID NO: 814 - protein, 29 aa, Artificial Sequence
  Synthetic peptide
  MOD_RES (16)..(16): Pegylation
  MOD_RES (27)..(27): Xaa is Met, Leu or Nle
HSQGTFTSDYSKYLDCRRAQDFVQWLXDT

SEQ ID NO: 815 - protein, 29 aa, Artificial Sequence
  Glucagon analogue
  MOD_RES (17)..(17): Pegylation
  MOD_RES (27)..(27): Xaa is Met, Leu or Nle
HSQGTFTSDYSKYLDSCRAQDFVQWLXDT

SEQ ID NO: 816 - protein, 29 aa, Artificial Sequence
  Glucagon analogue
  MOD_RES (21)..(21): Pegylation
  MOD_RES (27)..(27): Xaa is Met, Leu or Nle
HSQGTFTSDYSKYLDSRRAQCFVQWLXDT

SEQ ID NO: 817 - protein, 29 aa, Artificial Sequence
  Glucagon analogue
  MOD_RES (24)..(24): Pegylation
  MOD_RES (27)..(27): Xaa is Met, Leu or Nle
HSQGTFTSDYSKYLDSRRAQDFVCWLXDT

SEQ ID NO: 818 - protein, 29 aa, Artificial Sequence
  Glucagon analogue
  MOD_RES (21)..(21): Pegylation
  MOD_RES (27)..(27): Xaa is Met, Leu or Nle
HSQGTFTSDYSRYLDSRRAQKFVQWLXDT

SEQ ID NO: 819 - protein, 29 aa, Artificial Sequence
  Glucagon analogue
  MOD_RES (24)..(24): Pegylation
  MOD_RES (27)..(27): Xaa is Met, Leu or Nle
HSQGTFTSDYSRYLDSRRAQDFVKWLXDT

SEQ ID NO: 820 - protein, 10 aa, Artificial Sequence
  Synthetic peptide
  MISC_FEATURE: Peptide fragment representing carboxy terminal 10 amino acids of Exendin-4
GPSSGAPPPS

SEQ ID NO: 821 - protein, 8 aa, Artificial Sequence
  Synthetic peptide
  MISC_FEATURE: Peptide fragment representing the carboxy terminal 8 amino acids of oxyntomodulin
KRNRNNIA

SEQ ID NO: 822 - protein, 4 aa, Artificial Sequence
  Synthetic peptide
  MISC_FEATURE: Peptide fragment representing the amino 4 amino acids of oxyntomodulin carboxy terminus of SEQ ID NO: 21
KRNR

SEQ ID NO: 823 - protein, 10 aa, Artificial Sequence
  Synthetic peptide
  MISC_FEATURE: Peptide fragment representing the carboxy terminal 10 amino acids of Exendin-4
  MOD_RES (10)..(10): AMIDATION
GPSSGAPPPS

SEQ ID NO: 824 - protein, 39 aa, Artificial Sequence
  Glucagon analogue
HSQGTFTSDYSKYLDSRRAQDFVQWLMDTGPSSGAPPPS

SEQ ID NO: 825 - protein, 37 aa, Artificial Sequence; identical to SEQ ID NO: 706
  Glucagon analogue

SEQ ID NO: 826 - protein, 33 aa, Artificial Sequence
  Glucagon analogue
HSQGTFTSDYSKYLDSRRAQDFVQWLMDTKRNR

SEQ ID NO: 827 - protein, 29 aa, Artificial Sequence
  Glucagon analogue
HSQGTFTSDYSKYLDSCRAQDFVQWLMNT

SEQ ID NO: 828 - protein, 39 aa, Artificial Sequence; identical to SEQ ID NO: 521
  Synthetic peptide

SEQ ID NO: 829 - protein, 29 aa, Artificial Sequence
  Glucagon analogue
  MOD_RES (24)..(24): 2-butyrolactone bound through Cys thiol group
HSQGTFTSDYSKYLDSRRAQDFVQWLMNT

SEQ ID NO: 830 - protein, 29 aa, Artificial Sequence
  Glucagon analogue
  MOD_RES (24)..(24): Carboxymethyl group bound through Cys thiol group
HSQGTFTSDYSKYLDSRRAQDFVQWLMNT

SEQ ID NO: 831 - protein, 39 aa, Artificial Sequence; identical to SEQ ID NO: 521
  Glucagon analogue

SEQ ID NO: 832 - protein, 30 aa, Artificial Sequence
  Glucagon analog
  MOD_RES (30)..(30): Xaa is Asp, Glu, Lys, Arg or His
HSQGTFTSDYSKYLDSRRAQDFVQWLMDTX

SEQ ID NO: 833 - protein, 29 aa, Artificial Sequence
  Glucagon analogue
  MOD_RES (15)..(15): Xaa is Asp, Glu, cysteic acid, homoglutamic acid or homocysteic acid
  MOD_RES (27)..(27): Xaa is Met, Leu or Nle
  MOD_RES (28)..(28): Xaa is Asn, Lys, Arg, His, Asp or Glu
  MOD_RES (29)..(29): Xaa is Thr, Lys, Arg, His, Asp or Glu
HSQGTFTSDYSKYLXSRRAQDFVQWLXXX

SEQ ID NO: 834 - protein, 29 aa, Artificial Sequence
  Glucagon analogue
  MOD_RES (15)..(15): Xaa is Asp, Glu, cysteic acid, homoglutamic acid or homocysteic acid
  MOD_RES (27)..(27): Xaa is Met, Leu or Nle
  MOD_RES (28)..(28): Xaa is Asn or an acidic amino acid
  MOD_RES (29)..(29): Xaa is Thr or an acidic amino acid
HSQGTFTSDYSKYLXSRRAQDFVQWLXXX

SEQ ID NO: 835 - protein, 39 aa, Artificial Sequence
  Synthetic peptide
HSQGTFTSDYSKYLDSRRAQDFVQWLMETGPSSGAPPPS

SEQ ID NO: 836 - protein, 37 aa, Artificial Sequence
  Glucagon analogue
HSQGTFTSDYSKYLDSRRAQDFVQWLMETKRNRNNIA

SEQ ID NO: 837 - protein, 33 aa, Artificial Sequence
  Glucagon analogue
HSQGTFTSDYSKYLDSRRAQDFVQWLMETKRNR

SEQ ID NO: 838 - protein, 29 aa, Artificial Sequence
  Glucagon analogue
HSQGTFTSDYSKYLDSRRAQDFVQWLMET

SEQ ID NO: 839 - protein, 27 aa, Artificial Sequence
  Synthetic peptide
  MOD_RES (1)..(1): Xaa is any amino acid
  MOD_RES (2)..(2): Xaa is any amino acid
  MOD_RES (27)..(27): Met comprises Z
XXQGTFTSDYSKYLDSRRAQDFVQWLM

SEQ ID NO: 840 - protein, 29 aa, Artificial Sequence
  Synthetic peptide
  MOD_RES (1)..(1): Xaa is alpha, alpha-dimethyl imidiazole acetic acid (DMIA)
  MISC_FEATURE (16)..(20): Lactam bridge between residues 16 and 20
  MOD_RES (24)..(24): Pegylation
XSQGTFTSDYSKYLDERRAKDFVCWLMNT

SEQ ID NO: 841 - protein, 29 aa, Artificial Sequence
  Synthetic peptide
  MOD_RES (1)..(1): Xaa is alpha, alpha-dimethyl imidiazole acetic acid (DMIA)
  MISC_FEATURE (16)..(20): Lactam bridge between residues 16 and 20
  MOD_RES (24)..(24): Glutamine to alanine mutation
  MOD_RES (29)..(29): Pegylation
XSQGTFTSDYSKYLDERRAKDFVAWLMNC

SEQ ID NO: 842 - protein, 29 aa, Artificial Sequence
  Synthetic peptide
  MOD_RES (1)..(1): Xaa is alpha, alpha-dimethyl imidiazole acetic acid (DMIA)
  MISC_FEATURE (16)..(20): Lactam bridge between residues 16 and 20
  MOD_RES (24)..(24): Pegylation
  MOD_RES (27)..(27): Xaa is Nle or Leu
XSQGTFTSDYSKYLDERRAKDFVCWLXNT

SEQ ID NO: 843 - protein, 29 aa, Artificial Sequence
  Synthetic peptide
  MOD_RES (1)..(1): Xaa is alpha, alpha-dimethyl imidiazole acetic acid (DMIA)
  MISC_FEATURE (16)..(20): Lactam bridge between residues 16 and 20
  MISC_FEATURE (24)..(24): Glutamine to alanine mutation
  MISC_FEATURE (27)..(27): Xaa is Nle or Leu
  MOD_RES (29)..(29): Pegylation
XSQGTFTSDYSKYLDERRAKDFVAWLXNC

SEQ ID NO: 844 - protein, 29 aa, Artificial Sequence
  Synthetic peptide
  MISC_FEATURE: SEQ ID NO: 1 with  Ala 20, Ala 24, Nle 27, and Asp 28
  MOD_RES (27)..(27): Xaa is Nle
HSQGTFTSDYSKYLDSRRAADFVAWLXDT

SEQ ID NO: 845 - protein, 29 aa, Artificial Sequence
  Synthetic peptide
  MISC_FEATURE: SEQ ID NO: 1 with Ala 20, Ala 24, Nle27 , Asp 28, and Glu 29
  MOD_RES (27)..(27): Xaa is Nle
HSQGTFTSDYSKYLDSRRAADFVAWLXDE

SEQ ID NO: 846 - protein, 30 aa, Artificial Sequence
  Synthetic peptide
  MISC_FEATURE: SEQ ID NO: 1 with Ala 20, Ala 24, Nle 27, Asp 28, and Glu 30
  MOD_RES (27)..(27): Xaa is Nle
HSQGTFTSDYSKYLDSRRAADFVAWLXDTE

SEQ ID NO: 847 - protein, 29 aa, Artificial Sequence
  Synthetic peptide
  MISC_FEATURE: SEQ ID NO: 1 with Ala 20, Ala 24, Nle 27, Glu 28, and Glu 29
  MOD_RES (27)..(27): Xaa is Nle
HSQGTFTSDYSKYLDSRRAADFVAWLXEE

SEQ ID NO: 848 - protein, 30 aa, Artificial Sequence
  Synthetic peptide
  MISC_FEATURE: SEQ ID NO: 1 with Ala 20, Ala 24, Nle 27, Glu 28, and Glu 30
  MOD_RES (27)..(27): Xaa is Nle
HSQGTFTSDYSKYLDSRRAADFVAWLXETE

SEQ ID NO: 849 - protein, 30 aa, Artificial Sequence
  Synthetic peptide
  MOD_RES (27)..(27): Xaa is Nle
  MISC_FEATURE (27)..(27): SEQ ID NO: 1 with Ala 20, Ala 24, Nle 27, Glu 29, and Glu 30
HSQGTFTSDYSKYLDSRRAADFVAWLXNEE

SEQ ID NO: 850 - protein, 29 aa, Artificial Sequence
  Synthetic peptide
  MISC_FEATURE: SEQ ID NO: 1 with Ala 20, Glu 21, Ala 24, Nle 27, and Asp 28
  MOD_RES (27)..(27): Xaa is Nle
HSQGTFTSDYSKYLDSRRAAEFVAWLXDT

SEQ ID NO: 851 - protein, 29 aa, Artificial Sequence
  Synthetic peptide
  MISC_FEATURE: SEQ ID NO: 1 with Ala 20, Glu 21, Ala 24, Nle 27, Asp 28, and Glu 29
  MOD_RES (27)..(27): Xaa is Nle
HSQGTFTSDYSKYLDSRRAAEFVAWLXDE

SEQ ID NO: 852 - protein, 29 aa, Artificial Sequence
  Synthetic peptide
  MISC_FEATURE: SEQ ID NO: 1 with Ala 20, Glu 21, Ala 24, Nle 27, Asp 28, and Glu 30
  MOD_RES (27)..(27): Xaa is Nle
HSQGTFTSDYSKYLDSRRAAEFVAWLXDE

SEQ ID NO: 853 - protein, 29 aa, Artificial Sequence
  Synthetic peptide
  MISC_FEATURE: SEQ ID NO :1 with Ala 20, Glu 21, Ala 24, Nle 27, Glu 28, and Glu 29
  MOD_RES (27)..(27): Xaa is Nle
HSQGTFTSDYSKYLDSRRAAEFVAWLXEE

SEQ ID NO: 854 - protein, 29 aa, Artificial Sequence
  Synthetic peptide
  MISC_FEATURE: SEQ ID NO: 1 with Ala 20, Glu 21, Ala 24, Nle 27, Glu 28, and Glu 30
HSQGTFTSDYSKYLDSRRAQDFVQWLMNT

SEQ ID NO: 855 - protein, 30 aa, Artificial Sequence
  Synthetic peptide
  MISC_FEATURE: SEQ ID NO: 1 with Ala 20, Glu 21, Ala 24, Nle 27, Glu 29, and Glu 30
  MOD_RES (27)..(27): Xaa is Nle
HSQGTFTSDYSKYLDSRRAAEFVAWLXNEE

SEQ ID NO: 856 - protein, 29 aa, Artificial Sequence
  Synthetic peptide
  MISC_FEATURE: SEQ ID NO: 1 with Thr 16, Ala 20, Glu 21, Ala 24, Nle 27, Asp 28, and Glu29
  MOD_RES (27)..(27): Xaa is Nle
HSQGTFTSDYSKYLDTRRAAEFVAWLXDE

SEQ ID NO: 857 - protein, 31 aa, Homo sapiens; identical to SEQ ID NO: 703

SEQ ID NO: 858 - protein, 30 aa, Homo sapiens; identical to SEQ ID NO: 704
  MOD_RES (30)..(30): AMIDATION

SEQ ID NO: 859 - protein, 29 aa, Artificial Sequence
  Synthetic peptide
  MOD_RES (3)..(3): Xaa is Glutamine analog
  MOD_RES (27)..(27): Xaa is Nle
HSXGTFTSDYSKYLDTRRAAEFVAWLXDE

SEQ ID NO: 860 - protein, 29 aa, Artificial Sequence
  Synthetic peptide
  MOD_RES (3)..(3): Xaa is Glutamine analog
  MOD_RES (16)..(16): Xaa is Aminoisobutryic acid
HSXGTFTSDYSKYLDXRRAADFVAWLMDE

SEQ ID NO: 861 - protein, 29 aa, Artificial Sequence
  Synthetic peptide
  MOD_RES (27)..(27): Xaa is Nle
HSQGTFTSDYSKYLDTRRAAEFVAWLXDE

SEQ ID NO: 862 - protein, 29 aa, Artificial Sequence
  Synthetic peptide
  MOD_RES (3)..(3): Xaa is Acetamidomethyl-cysteine
  MOD_RES (27)..(27): Xaa is Nle
HSXGTFTSDYSKYLDTRRAAEFVAWLXDE

SEQ ID NO: 863 - protein, 29 aa, Artificial Sequence
  Synethic peptide
  MOD_RES (3)..(3): Xaa is Acetyldiaminobutanoic acid
  MOD_RES (27)..(27): Xaa is Nle
HSXGTFTSDYSKYLDTRRAAEFVAWLXDE

SEQ ID NO: 864 - protein, 29 aa, Artificial Sequence
  Synthetic peptide
  MOD_RES (3)..(3): Xaa is Carbamoyldiaminopropanoic acid
  MOD_RES (27)..(27): Xaa is Nle
HSXGTFTSDYSKYLDTRRAAEFVAWLXDE

SEQ ID NO: 865 - protein, 29 aa, Artificial Sequence
  Synthetic peptide
  MOD_RES (3)..(3): Xaa is Methylglutamine
  MOD_RES (27)..(27): Xaa is Nle
HSXGTFTSDYSKYLDTRRAAEFVAWLXDE

SEQ ID NO: 866 - protein, 29 aa, Artificial Sequence
  Synthetic peptide
  MOD_RES (3)..(3): Xaa is Methionine sulfoxide
  MOD_RES (27)..(27): Xaa is Nle
HSXGTFTSDYSKYLDTRRAAEFVAWLXDE

SEQ ID NO: 867 - protein, 29 aa, Artificial Sequence
  Synthetic peptide
  MOD_RES (3)..(3): Xaa is Acetylornithine
  MOD_RES (27)..(27): Xaa is Nle
HSXGTFTSDYSKYLDTRRAAEFVAWLXDE

SEQ ID NO: 868 - protein, 29 aa, Artificial Sequence
  Synthetic peptide
  MOD_RES (16)..(16): Xaa is Aminoisobutryic acid
HSQGTFTSDYSKYLDXRRAADFVAWLMDE

SEQ ID NO: 869 - protein, 29 aa, Artificial Sequence
  Synthetic peptide
  MOD_RES (3)..(3): Xaa is Acetyldiaminobutanoic acid
  MOD_RES (16)..(16): Xaa is Aminoisobutryic acid
HSXGTFTSDYSKYLDXRRAADFVAWLMDE

SEQ ID NO: 870 - protein, 29 aa, Artificial Sequence
  Synthetic peptide
  MOD_RES (3)..(3): Xaa is Methylglutamine
  MOD_RES (16)..(16): Xaa is Aib
HSXGTFTSDYSKYLDXRRAADFVAWLMDE

SEQ ID NO: 871 - protein, 29 aa, Artificial Sequence
  Synthetic peptide
  MOD_RES (3)..(3): Xaa is acetyldiaminobutanoic acid
  MOD_RES (16)..(16): Xaa is Aib
HSXGTFTSDYSKYLDXRRAADFVAWLLDE

SEQ ID NO: 872 - protein, 39 aa, Artificial Sequence; identical to SEQ ID NO: 604
  Synthetic peptide
  MOD_RES (3)..(3): Xaa is Acetyldiaminobutanoic acid
  MOD_RES (16)..(16): Aminoisobutryic Acid
  MOD_RES (39)..(39): AMIDATION

SEQ ID NO: 873 - protein, 29 aa, Artificial Sequence
  Synthetic peptide
  MOD_RES (3)..(3): Xaa is Acetyldiaminobutanoic acid
  MOD_RES (16)..(16): Xaa is Aminoisobutryric acid
HSXGTFTSDYSKYLDXRRASDFVSWLLDE

SEQ ID NO: 874 - protein, 29 aa, Artificial Sequence
  Synthetic peptide
  MOD_RES (3)..(3): Xaa is Acetyldiaminobutanoic acid
  MOD_RES (16)..(16): Xaa is Aminoisobutryic acid
HSXGTFTSDYSKYLDXRRATDFVTWLLDE

SEQ ID NO: 875 - protein, 29 aa, Artificial Sequence
  Synthetic peptide
HSQGTFTSDYSKYLDSRRAQDFVQWLMDE

SEQ ID NO: 876 - protein, 29 aa, Artificial Sequence
  Synthetic peptide
  MOD_RES (16)..(16): Xaa is Aib
HSQGTFTSDYSKYLDXRRAQDFVQWLMDE

SEQ ID NO: 877 - protein, 29 aa, Artificial Sequence
  Synthetic peptide
  misc_feature (3)..(3): Xaa can be any naturally occurring amino acid
HSXGTFTSDYSKYLDSRRAQDFVQWLMNT

SEQ ID NO: 878 - protein, 29 aa, Artificial Sequence
  Synthetic peptide
HSQGTFTSDYSKYLDSRRAQDFVQWLMDT

SEQ ID NO: 879 - protein, 30 aa, Artificial Sequence; identical to SEQ ID NO: 581
  Synthetic peptide
  MOD_RES (2)..(2): Xaa is d-Ser
  MOD_RES (30)..(30): Acylated with a C14 fatty acyl group
  MOD_RES (30)..(30): AMIDATION

SEQ ID NO: 880 - protein, 29 aa, Artificial Sequence
  Synthetic peptide
  MOD_RES (2)..(2): Xaa is d-Ser
  MOD_RES (10)..(10): Acylated with a C14 fatty acyl group
  MOD_RES (29)..(29): AMIDATION
HXQGTFTSDKSKYLDERRAKDFVQWLMNT

SEQ ID NO: 881 - protein, 30 aa, Artificial Sequence; identical to SEQ ID NO: 581
  Synthetic peptide
  MOD_RES (2)..(2): Xaa is d-Ser
  MOD_RES (30)..(30): Acylated with a C16 fatty acyl group
  MOD_RES (30)..(30): AMIDATION

SEQ ID NO: 882 - protein, 29 aa, Artificial Sequence
  Synthetic peptide
  MOD_RES (2)..(2): Xaa is d-Ser
  MOD_RES (10)..(10): Acylated with a C16 fatty acyl group
  MOD_RES (29)..(29): AMIDATION
HXQGTFTSDKSKYLDERRAKDFVQWLMNT

SEQ ID NO: 883 - protein, 29 aa, Artificial Sequence
  Synthetic peptide
  MOD_RES (2)..(2): Aminoisobutryic Acid
  MOD_RES (10)..(10): Acylated with a C18 fatty acyl group
  MOD_RES (24)..(24): Cys-PEG
  MOD_RES (29)..(29): AMIDATION
HXQGTFTSDKSKYLDEQAAKEFICWLMNT

SEQ ID NO: 884 - protein, 30 aa, Artificial Sequence; identical to SEQ ID NO: 586
  Synthetic peptide
  MOD_RES (2)..(2): Aminoisobutryic Acid
  MOD_RES (24)..(24): Cys-PEG
  MOD_RES (30)..(30): Acylated with a C18 fatty acyl group
  MOD_RES (30)..(30): AMIDATION

SEQ ID NO: 885 - protein, 29 aa, Artificial sequence
  Synthetic peptide
  MOD_RES (16)..(16): Xaa is Ser or alpha, alpha-disubstituted amino acid
  MOD_RES (20)..(20): Xaa is Gln or alpha, alpha-disubstituted amino acid
  MOD_RES (21)..(21): Xaa is Asp or alpha, alpha-disubstituted amino acid
  MOD_RES (24)..(24): Xaa is Gln or alpha, alpha-disubstituted amino acid
HSQGTFTSDYSKYLDXRRAXXFVXWLMNT

SEQ ID NO: 886 - protein, 29 aa, Artificial Sequence
  Synthetic peptide
  MOD_RES (16)..(16): Xaa is Aib
HSQGTFTSDYSKYLDXRRAQDFVQWLMNT

SEQ ID NO: 887 - protein, 29 aa, Artificial Sequence
  Synthetic peptide
  MOD_RES (19)..(19): Xaa is Aib
HSQGTFTSDYSKYLDSRRXQDFVQWLMNT

SEQ ID NO: 888 - protein, 29 aa, Artificial Sequence
  Synthetic peptide
  MOD_RES (20)..(20): Xaa is Aib
HSQGTFTSDYSKYLDSRRAXDFVQWLMNT

SEQ ID NO: 889 - protein, 29 aa, Artificial Sequence
  Synthetic peptide
  MOD_RES (21)..(21): Xaa is Aib
HSQGTFTSDYSKYLDSRRAQXFVQWLMNT

SEQ ID NO: 890 - protein, 29 aa, Artificial Sequence
  Synthetic peptide
  MOD_RES (24)..(24): Xaa is Aib
HSQGTFTSDYSKYLDSRRAQDFVXWLMNT

SEQ ID NO: 891 - protein, 29 aa, Artificial Sequence
  Synthetic peptide
  MOD_RES (16)..(16): Xaa is Aib
  MOD_RES (20)..(20): Xaa is Aib
HSQGTFTSDYSKYLDXRRAXDFVQWLMNT

SEQ ID NO: 892 - protein, 29 aa, Artificial Sequence
  Synthetic peptide
  MOD_RES (16)..(16): Xaa is Aib
  MOD_RES (24)..(24): Xaa is Aib
HSQGTFTSDYSKYLDXRRAQDFVXWLMNT

SEQ ID NO: 893 - protein, 29 aa, Artificial Sequence
  Synthetic peptide
  MOD_RES (20)..(20): Xaa is Aib
  MOD_RES (24)..(24): Xaa is Aib
HSQGTFTSDYSKYLDSRRAXDFVXWLMNT

SEQ ID NO: 894 - protein, 29 aa, Artificial Sequence
  Synthetic peptide
  MOD_RES (16)..(16): Xaa is Aib
  MOD_RES (20)..(20): Xaa is Aib
  MOD_RES (24)..(24): Xaa is Aib
HSQGTFTSDYSKYLDXRRAXDFVXWLMNT

SEQ ID NO: 895 - protein, 29 aa, Artificial Sequence
  Synthetic peptide
  MOD_RES (2)..(2): Xaa is Aib
  MOD_RES (16)..(16): Xaa is Aib
  MOD_RES (29)..(29): AMIDATION
HXQGTFTSDKSKYLDXRRAQDFVQWLMNT

SEQ ID NO: 896 - protein, 29 aa, Artificial Sequence
  Synthetic peptide
  MOD_RES (2)..(2): Xaa is Aib
  MOD_RES (16)..(16): Xaa is Aib
  MOD_RES (29)..(29): AMIDATION
HXQGTFTSDYSKYLDXRRAQDFVQWLMNT

SEQ ID NO: 897 - protein, 29 aa, Artificial Sequence
  Synthetic peptide
  MOD_RES (2)..(2): Xaa is Aib
  MOD_RES (10)..(10): Acylated with a C16 fatty acyl group
  MOD_RES (16)..(16): Xaa is Aib
  MOD_RES (29)..(29): AMIDATION
HXQGTFTSDKSKYLDXRRAQDFVQWLMNT

SEQ ID NO: 898 - protein, 29 aa, Artificial Sequence
  Synthetic peptide
  MOD_RES (2)..(2): Xaa is Aib
  MOD_RES (10)..(10): Acylated with a C16 fatty acyl group via Ala-Ala spacer
  MOD_RES (16)..(16): Xaa is Aib
  MOD_RES (29)..(29): AMIDATION
HXQGTFTSDKSKYLDXRRAQDFVQWLMNT

SEQ ID NO: 899 - protein, 29 aa, Artificial Sequence
  Synthetic peptide
  MOD_RES (2)..(2): Xaa is Aib
  MOD_RES (10)..(10): Acylated with a C16 fatty acyl group via dipeptide spacer
  MOD_RES (16)..(16): Xaa is Aib
  MOD_RES (29)..(29): AMIDATION
HXQGTFTSDKSKYLDXRRAQDFVQWLMNT

SEQ ID NO: 900 - protein, 29 aa, Artificial Sequence
  Synthetic peptide
  MOD_RES (2)..(2): Xaa is Aib
  MOD_RES (10)..(10): Acylated with a C16 fatty acyl group via beta-Ala-beta-Ala spacer
  MOD_RES (16)..(16): Xaa is Aib
  MOD_RES (29)..(29): AMIDATION
HXQGTFTSDKSKYLDXRRAQDFVQWLMNT

SEQ ID NO: 901 - protein, 29 aa, Artificial Sequence
  Synthetic peptide
  MOD_RES (2)..(2): Xaa is Aib
  MOD_RES (10)..(10): Acylated with a C16 fatty acyl group via 6-aminohexanoic acid spacer
  MOD_RES (16)..(16): Xaa is Aib
  MOD_RES (29)..(29): AMIDATION
HXQGTFTSDKSKYLDXRRAQDFVQWLMNT

SEQ ID NO: 902 - protein, 29 aa, Artificial Sequence
  Synthetic peptide
  MOD_RES (2)..(2): Xaa is Aib
  MOD_RES (10)..(10): Acylated with a C16 fatty acyl group via Leu-Leu spacer
  MOD_RES (16)..(16): Xaa is Aib
  MOD_RES (29)..(29): AMIDATION
HXQGTFTSDKSKYLDXRRAQDFVQWLMNT

SEQ ID NO: 903 - protein, 29 aa, Artificial Sequence
  Synthetic peptide
  MOD_RES (2)..(2): Xaa is Aib
  MOD_RES (10)..(10): Acylated with a C16 fatty acyl group via Pro-Pro spacer
  MOD_RES (16)..(16): Xaa is Aib
  MOD_RES (29)..(29): AMIDATION
HXQGTFTSDKSKYLDXRRAQDFVQWLMNT

SEQ ID NO: 904 - protein, 29 aa, Artificial Sequence
  Synthetic peptide
  MOD_RES (2)..(2): Xaa is Aib
  MOD_RES (10)..(10): Acylated with a C14 fatty acyl group
  MOD_RES (16)..(16): Xaa is Aib
  MOD_RES (24)..(24): Cys-PEG
  MOD_RES (29)..(29): AMIDATION
HXQGTFTSDKSKYLDXRRAQDFVCWLMNT

SEQ ID NO: 905 - protein, 29 aa, Artificial Sequence
  Synthetic peptide
  MOD_RES (2)..(2): Xaa is Aib
  MOD_RES (10)..(10): Acylated with a C14 fatty acyl group via dipeptide spacer
  MOD_RES (16)..(16): Xaa is Aib
  MOD_RES (24)..(24): Cys-PEG
  MOD_RES (29)..(29): AMIDATION
HXQGTFTSDKSKYLDXRRAQDFVCWLMNT

SEQ ID NO: 906 - protein, 29 aa, Artificial Sequence
  Synthetic peptide
  MOD_RES (2)..(2): Xaa is Aib
  MOD_RES (10)..(10): Acylated with a C14 fatty acyl group via dipeptide spacer
  MOD_RES (16)..(16): Xaa is Aib
  MOD_RES (29)..(29): AMIDATION
HXQGTFTSDKSKYLDXRRAQDFVQWLMNT

SEQ ID NO: 907 - protein, 29 aa, Artificial Sequence
  Synthetic peptide
  MOD_RES (2)..(2): Xaa is Aib
  MOD_RES (10)..(10): Acylated with a C14 fatty acyl group via Ala-Ala spacer
  MOD_RES (16)..(16): Xaa is Aib
  MOD_RES (24)..(24): Cys-PEG
  MOD_RES (29)..(29): AMIDATION
HXQGTFTSDKSKYLDXRRAQDFVCWLMNT

SEQ ID NO: 908 - protein, 29 aa, Artificial Sequence
  Synthetic peptide
  MOD_RES (2)..(2): Xaa is Aib
  MOD_RES (10)..(10): Acylated with a C14 fatty acyl group via Ala-Ala spacer
  MOD_RES (16)..(16): Xaa is Aib
  MOD_RES (29)..(29): AMIDATION
HXQGTFTSDKSKYLDXRRAQDFVQWLMNT

SEQ ID NO: 909 - protein, 29 aa, Artificial Sequence
  Synthetic peptide
  MOD_RES (2)..(2): Xaa is Aib
  MOD_RES (10)..(10): Acylated with a C16 fatty acyl group via Ala-Ala spacer
  MOD_RES (16)..(16): Xaa is Aib
  MOD_RES (24)..(24): Cys-PEG
  MOD_RES (29)..(29): AMIDATION
HXQGTFTSDKSKYLDXRRAQDFVCWLMNT

SEQ ID NO: 910 - protein, 29 aa, Artificial Sequence
  Synthetic peptide
  MOD_RES (2)..(2): Xaa is Aib
  MOD_RES (10)..(10): Acylated with a C16 fatty acyl group via dipeptide spacer
  MOD_RES (16)..(16): Xaa is Aib
  MOD_RES (24)..(24): Cys-PEG
  MOD_RES (29)..(29): AMIDATION
HXQGTFTSDKSKYLDXRRAQDFVCWLMNT

SEQ ID NO: 911 - protein, 29 aa, Artificial Sequence
  Synthetic peptide
  MOD_RES (2)..(2): Xaa is Aib
  MOD_RES (10)..(10): Covalently bound to a C14 fatty acyl group
  MOD_RES (16)..(16): Xaa is Aib
  MOD_RES (29)..(29): AMIDATION
HXQGTFTSDKSKYLDXRRAQDFVCWLMNT

SEQ ID NO: 912 - protein, 29 aa, Artificial Sequence
  Synthetic peptide
  MOD_RES (2)..(2): Xaa is Aib
  MOD_RES (10)..(10): Covalently bound to C14 fatty acyl group via dipeptide spacer
  MOD_RES (16)..(16): Xaa is Aib
  MOD_RES (29)..(29): AMIDATION
HXQGTFTSDKSKYLDXRRAQDFVCWLMNT

SEQ ID NO: 913 - protein, 29 aa, Artificial Sequence
  Synthetic peptide
  MOD_RES (2)..(2): Xaa is Aib
  MOD_RES (10)..(10): Covalently bound to C14 fatty acyl group via Ala-Ala spacer
  MOD_RES (16)..(16): Xaa is Aib
  MOD_RES (29)..(29): AMIDATION
HXQGTFTSDKSKYLDXRRAQDFVCWLMNT

SEQ ID NO: 914 - protein, 29 aa, Artificial Sequence
  Synthetic peptide
  MOD_RES (2)..(2): Xaa is Aib
  MOD_RES (10)..(10): Covalently bound to C16 fatty acyl group via dipeptide spacer
  MOD_RES (16)..(16): Xaa is Aib
  MOD_RES (29)..(29): AMIDATION
HXQGTFTSDKSKYLDXRRAQDFVCWLMNT

SEQ ID NO: 915 - protein, 29 aa, Artificial Sequence
  Synthetic peptide
  MOD_RES (2)..(2): Xaa is Aib
  MOD_RES (10)..(10): Covelently bound to C16 fatty acyl group via Ala-Ala spacer
  MOD_RES (16)..(16): Xaa is Aib
  MOD_RES (29)..(29): AMIDATION
HXQGTFTSDKSKYLDXRRAQDFVCWLMNT

SEQ ID NO: 916 - protein, 30 aa, Artificial Sequence; identical to SEQ ID NO: 581
  Synthetic peptide
  MOD_RES (2)..(2): D-serine, D-alanine, valine, amino n-butyric acid, glycine, N-methyl serine, aminoisobutyric acid
  MOD_RES (30)..(30): Acylated with a C14 fatty acyl group
  MOD_RES (30)..(30): AMIDATION

SEQ ID NO: 917 - protein, 29 aa, Artificial Sequence
  Synthetic peptide
  MOD_RES (2)..(2): D-serine, D-alanine, valine, amino n-butyric acid, glycine, N-methyl serine, aminoisobutyric acid
  MOD_RES (10)..(10): Acylated with a C14 fatty acyl group
  MOD_RES (29)..(29): AMIDATION
HXQGTFTSDKSKYLDERRAKDFVQWLMNT

SEQ ID NO: 918 - protein, 30 aa, Artificial Sequence; identical to SEQ ID NO: 581
  Synthetic peptide
  MOD_RES (2)..(2): D-serine, D-alanine, valine, amino n-butyric acid, glycine, N-methyl serine, aminoisobutyric acid
  MOD_RES (30)..(30): Acylated with a C16 fatty acyl group
  MOD_RES (30)..(30): AMIDATION

SEQ ID NO: 919 - protein, 29 aa, Artificial Sequence
  Synthetic peptide
  MOD_RES (2)..(2): D-serine, D-alanine, valine, amino n-butyric acid, glycine, N-methyl serine, aminoisobutyric acid
  MOD_RES (10)..(10): Acylated with a C16 fatty acyl group
  MOD_RES (29)..(29): AMIDATION
HXQGTFTSDKSKYLDERRAKDFVQWLMNT

SEQ ID NO: 920 - protein, 29 aa, Artificial Sequence
  Synthetic Polypeptide
  MISC_FEATURE: c-term amidation
  MOD_RES (1)..(1): (Des-amino)His
  MISC_FEATURE (12)..(16): Lactam ring between side chains at positions 12 and 16
XSQGTFTSDYSKYLDEQAAKEFIAWLMNT

SEQ ID NO: 921 - protein, 29 aa, Artificial Sequence
  Synthetic Polypeptide
  MISC_FEATURE: c-term amidation
  MOD_RES (1)..(1): (Des-amino)His
  MISC_FEATURE (16)..(20): Lactam ring between side chains at positions 16 and 20
XSQGTFTSDYSKYLDEQAAKEFIAWLMNT

SEQ ID NO: 922 - protein, 29 aa, Artificial Sequence
  Synthetic Polypeptide
  MISC_FEATURE: c-term amidation
  MOD_RES (1)..(1): (Des-amino)His
XSQGTFTSDYSKYLDEQAAKEFIAWLVKG

SEQ ID NO: 923 - protein, 29 aa, Artificial Sequence
  Synthetic Polypeptide
  MISC_FEATURE: c-term amidation
  MOD_RES (1)..(1): (Des-amino)His
  MISC_FEATURE (12)..(16): Lactam ring between side chains at positions 12 and 16
XSQGTFTSDYSKYLDEQAAKEFIAWLVKG

SEQ ID NO: 924 - protein, 29 aa, Artificial Sequence
  Synthetic Polypeptide
  MISC_FEATURE: c-term amidation
  MOD_RES (1)..(1): (Des-amino)His
  MISC_FEATURE (16)..(20): Lactam ring between side chains at positions 16 and 20
XSQGTFTSDYSKYLDEQAAKEFIAWLVKG

SEQ ID NO: 925 - protein, 29 aa, Artificial Sequence
  Synthetic Polypeptide
  MOD_RES (2)..(2): Aminoisobutyric acid
  MISC_FEATURE (29)..(29): c-term amidation
HXQGTFTSDYSKYLDERRAQDFVQWLMNT

SEQ ID NO: 926 - protein, 29 aa, Artificial Sequence
  Synthetic Polypeptide
  MISC_FEATURE: c-term amidation
  MOD_RES (2)..(2): Aminoisobutyric acid
  MISC_FEATURE (16)..(20): Lactam ring between side chains at positions 16 and 20
HXQGTFTSDYSKYLDERRAKDFVQWLMNT

SEQ ID NO: 927 - protein, 29 aa, Artificial Sequence
  Synthetic Polypeptide
  MISC_FEATURE: c-term amidation
  MOD_RES (2)..(2): Aminoisobutyric acid
  MISC_FEATURE (16)..(20): Lactam ring between side chains at positions 16 and 20
HXQGTFTSDYSKYLDERRAKDFVQWLMNT

SEQ ID NO: 928 - protein, 29 aa, Artificial Sequence
  Synthetic Polypeptide
  MISC_FEATURE: c-term amidation
  MOD_RES (2)..(2): Aminoisobutyric acid
  MISC_FEATURE (12)..(16): Lactam ring between side chains at positions 12 and 16
HXQGTFTSDYSKYLDERRAQDFVQWLMNT

SEQ ID NO: 929 - protein, 29 aa, Artificial Sequence
  Synthetic Polypeptide
  MISC_FEATURE: c-term amidation
  MOD_RES (2)..(2): Aminoisebutyric acid
  MISC_FEATURE (12)..(16): Lactam ring between side chains at positions 12 and 16
HXQGTFTSDYSKYLDERRAKDFVQWLMNT

SEQ ID NO: 930 - protein, 29 aa, Artificial Sequence
  Synthetic Polypeptide
  MISC_FEATURE: c-term amidation
  MOD_RES (2)..(2): Aminoisobutyric acid
  MISC_FEATURE (16)..(20): Lactam ring between side chains at positions 16 and 20
HXQGTFTSDYSKYLDKRRAEDFVQWLMNT

SEQ ID NO: 931 - protein, 29 aa, Artificial Sequence
  Synthetic Polypeptide
  MISC_FEATURE: c-term amidation
  MOD_RES (2)..(2): Aminoisobutyric acid
HXQGTFTSDYSKYLDERAAKDFVQWLMNT

SEQ ID NO: 932 - protein, 29 aa, Artificial Sequence
  Synthetic Polypeptide
  MISC_FEATURE: c-term amidation
  MOD_RES (2)..(2): Aminoisobutyric acid
  MISC_FEATURE (16)..(20): Lactam ring between side chains at positions 16 and 20
HXQGTFTSDYSKYLDERAAKDFVQWLMNT

SEQ ID NO: 933 - protein, 29 aa, Artificial Sequence
  Synthetic Polypeptide
  MISC_FEATURE: c-term amidation
  MOD_RES (2)..(2): Aminoisobutryic acid
  MISC_FEATURE (12)..(16): Lactam ring between side chains at positions 12 and 16
HXQGTFTSDYSKYLDERAAQDFVQWLMNT

SEQ ID NO: 934 - protein, 29 aa, Artificial Sequence
  glucagon analog
  MISC_FEATURE: c-term amidation
  MOD_RES (2)..(2): Aminoisobutryic acid
  MISC_FEATURE (12)..(16): Lactam ring between side chains at positions 12 and 16
HXQGTFTSDYSKYLDERAAKDFVQWLMNT

SEQ ID NO: 935 - protein, 29 aa, Artificial Sequence
  glucagon analog
  MISC_FEATURE: c-term amidation
  MOD_RES (2)..(2): Aminoisobutryic acid
  MISC_FEATURE (16)..(20): Lactam ring between side chains at positions 16 and 20
HXQGTFTSDYSKYLDKRAAEDFVQWLMNT

SEQ ID NO: 936 - protein, 29 aa, Artificial Sequence
  glucagon analog
  MISC_FEATURE: c-term amidation
  MOD_RES (2)..(2): Aminoisobutyric acid
HXQGTFTSDYSKYLDEQAAKEFIAWLMNT

SEQ ID NO: 937 - protein, 29 aa, Artificial Sequence
  glucagon analog
  MISC_FEATURE: c-term amidation
  MOD_RES (2)..(2): Aminoisobutryic acid
  MISC_FEATURE (12)..(16): Lactam ring between side chains at positions 12 and 16
HXQGTFTSDYSKYLDEQAAKEFIAWLMNT

SEQ ID NO: 938 - protein, 29 aa, Artificial Sequence
  glucagon analog
  MISC_FEATURE: c-term amidation
  MOD_RES (2)..(2): Aminoisobutryic acid
  MISC_FEATURE (16)..(20): Lactam ring between side chains at positions 16 and 20
HXQGTFTSDYSKYLDEQAAKEFIAWLMNT

SEQ ID NO: 939 - protein, 29 aa, Artificial Sequence
  glucagon analog
  MISC_FEATURE: c-term amidation
  MOD_RES (2)..(2): Aminoisobutyric acid
HXQGTFTSDYSKYLDEQAAKEFIAWLVKG

SEQ ID NO: 940 - protein, 29 aa, Artificial Sequence
  glucagon analog
  MISC_FEATURE: c-term amidation
  MOD_RES (2)..(2): Aminoisobutyric acid
  MISC_FEATURE (12)..(16): Lactam ring between side chains at positions 12 and 16
HXQGTFTSDYSKYLDEQAAKEFIAWLVKG

SEQ ID NO: 941 - protein, 29 aa, Artificial Sequence
  glucagon analog
  MISC_FEATURE: c-term amidation
  MOD_RES (2)..(2): Aminoisobutyric acid
  MISC_FEATURE (16)..(20): Lactam ring between side chains at positions 16 and 20
HXQGTFTSDYSKYLDEQAAKEFIAWLVKG

SEQ ID NO: 942 - protein, 29 aa, Artificial Sequence
  glucagon analog
  MISC_FEATURE: c-term amidation
  MOD_RES (2)..(2): D-Ala
HXQGTFTSDYSKYLDERRAQDFVQWLMNT

SEQ ID NO: 943 - protein, 29 aa, Artificial Sequence
  glucagon analog
  MISC_FEATURE: c-term amidation
  MOD_RES (2)..(2): D-Ala
HXQGTFTSDYSKYLDERRAKDFVQWLMNT

SEQ ID NO: 944 - protein, 29 aa, Artificial Sequence
  glucagon analog
  MISC_FEATURE: c-term amidation
  MOD_RES (2)..(2): D-Ala
  MISC_FEATURE (16)..(20): Lactam ring between side chains at positions 16 and 20
HXQGTFTSDYSKYLDERRAKDFVQWLMNT

SEQ ID NO: 945 - protein, 29 aa, Artificial Sequence
  glucagon analog
  MISC_FEATURE: c-term amidation
  MOD_RES (2)..(2): D-Ala
  MISC_FEATURE (12)..(16): Lactam ring between side chains at positions 12 and 16
HXQGTFTSDYSKYLDERRAQDFVQWLMNT

SEQ ID NO: 946 - protein, 29 aa, Artificial Sequence
  glucagon analog
  MISC_FEATURE: c-term amidation
  MOD_RES (2)..(2): D-Ala
  MISC_FEATURE (12)..(16): Lactam ring between side chains at positions 12 and 16
HXQGTFTSDYSKYLDERRAKDFVQWLMNT

SEQ ID NO: 947 - protein, 29 aa, Artificial Sequence
  glucagon analog
  MISC_FEATURE: c-term amidation
  MOD_RES (2)..(2): D-Ala
  MISC_FEATURE (16)..(20): Lactam ring between side chains at positions 16 and 20
HXQGTFTSDYSKYLDKRRAEDFVQWLMNT

SEQ ID NO: 948 - protein, 29 aa, Artificial Sequence
  glucagon analog
  MISC_FEATURE: c-term amidation
  MOD_RES (2)..(2): D-Ala
HXQGTFTSDYSKYLDERAAKDFVQWLMNT

SEQ ID NO: 949 - protein, 29 aa, Artificial Sequence
  glucagon analog
  MISC_FEATURE: c-term amidation
  MOD_RES (2)..(2): D-Ala
  MISC_FEATURE (16)..(20): Lactam ring between side chains at positions 16 and 20
HXQGTFTSDYSKYLDERAAKDFVQWLMNT

SEQ ID NO: 950 - protein, 29 aa, Artificial Sequence
  glucagon analog
  MISC_FEATURE: c-term amidation
  MOD_RES (2)..(2): D-Ala
  MISC_FEATURE (12)..(16): Lactam ring between side chains at positions 12 and 16
HXQGTFTSDYSKYLDERAAQDFVQWLMNT

SEQ ID NO: 951 - protein, 29 aa, Artificial Sequence
  glucagon analog
  MISC_FEATURE: c-term amidation
  MOD_RES (2)..(2): D-Ala
  MISC_FEATURE (12)..(16): Lactam ring between side chains at positions 12 and 16
HXQGTFTSDYSKYLDERAAKDFVQWLMNT

SEQ ID NO: 952 - protein, 29 aa, Artificial Sequence
  glucagon analog
  MISC_FEATURE: c-term amidation
  MOD_RES (2)..(2): D-Ala
  MISC_FEATURE (16)..(20): Lactam ring between side chains at positions 16 and 20
HXQGTFTSDYSKYLDKRAAEDFVQWLMNT

SEQ ID NO: 953 - protein, 29 aa, Artificial Sequence
  glucagon analog
  MISC_FEATURE: c-term amidation
  MOD_RES (2)..(2): D-Ala
HXQGTFTSDYSKYLDEQAAKEFIAWLMNT

SEQ ID NO: 954 - protein, 29 aa, Artificial Sequence
  glucagon analog
  MISC_FEATURE: c-term amidation
  MOD_RES (2)..(2): D-Ala
  MISC_FEATURE (12)..(16): Lactam ring between side chains at positions 12 and 16
HXQGTFTSDYSKYLDEQAAKEFIAWLMNT

SEQ ID NO: 955 - protein, 29 aa, Artificial Sequence
  glucagon analog
  MISC_FEATURE: c-term amidation
  MOD_RES (2)..(2): D-Ala
  MISC_FEATURE (16)..(20): Lactam ring between side chains at positions 16 and 20
HXQGTFTSDYSKYLDEQAAKEFIAWLMNT

SEQ ID NO: 956 - protein, 29 aa, Artificial Sequence
  glucagon analog
  MISC_FEATURE: c-term amidation
  MOD_RES (2)..(2): D-Ala
HXQGTFTSDYSKYLDEQAAKEFIAWLVKG

SEQ ID NO: 957 - protein, 29 aa, Artificial Sequence
  glucagon analog
  MISC_FEATURE: c-term amidation
  MOD_RES (2)..(2): D-Ala
  MISC_FEATURE (12)..(16): Lactam ring between side chains at positions 12 and 16
HXQGTFTSDYSKYLDEQAAKEFIAWLVKG

SEQ ID NO: 958 - protein, 29 aa, Artificial Sequence
  glucagon analog
  MISC_FEATURE: c-term amidation
  MOD_RES (2)..(2): D-Ala
  MISC_FEATURE (16)..(20): Lactam ring between side chains at positions 16 and 20
HXQGTFTSDYSKYLDEQAAKEFIAWLVKG

SEQ ID NO: 959 - protein, 29 aa, Artificial Sequence
  glucagon analog
  MISC_FEATURE: c-term amidation
HSEGTFTSDYSKYLDERRAQDFVQWLMNT

SEQ ID NO: 960 - protein, 29 aa, Artificial Sequence
  glucagon analog
  MISC_FEATURE: c-term amidation
HSEGTFTSDYSKYLDERRAKDFVQWLMNT

SEQ ID NO: 961 - protein, 29 aa, Artificial Sequence
  glucagon analog
  MISC_FEATURE: c-term amidation
  MISC_FEATURE (16)..(20): Lactam ring between side chains at positions 16 and 20
HSEGTFTSDYSKYLDERRAKDFVQWLMNT

SEQ ID NO: 962 - protein, 29 aa, Artificial Sequence
  glucagon analog
  MISC_FEATURE: c-term amidation
  MISC_FEATURE (12)..(16): Lactam ring between side chains at positions 12 and 16
HSEGTFTSDYSKYLDERRAQDFVQWLMNT

SEQ ID NO: 963 - protein, 29 aa, Artificial Sequence
  glucagon analog
  MISC_FEATURE: c-term amidation
HSEGTFTSDYSKYLDERAAKDFVQWLMNT

SEQ ID NO: 964 - protein, 29 aa, Artificial Sequence
  glucagon analog
  MISC_FEATURE: c-term amidation
  MISC_FEATURE (16)..(20): Lactam ring between side chains at positions 16 and 20
HSEGTFTSDYSKYLDERAAKDFVQWLMNT

SEQ ID NO: 965-1000 - skipped (36 entries)

SEQ ID NO: 1001 - protein, 29 aa, Homo sapiens
  MISC_FEATURE: Wild type glucagon
HSQGTFTSDYSKYLDSRRAQDFVQWLMNT

SEQ ID NO: 1002 - protein, 31 aa, Homo sapiens; identical to SEQ ID NO: 703
  MISC_FEATURE (1)..(31): GLP-1(7-37)

SEQ ID NO: 1003 - protein, 30 aa, Artificial sequence; identical to SEQ ID NO: 704
  Synthetic polypeptide
  MISC_FEATURE (1)..(30): GLP-1(7-36) amidated
  MISC_FEATURE (30)..(30): C-terminal amidation

SEQ ID NO: 1004 - protein, 42 aa, Homo sapiens; identical to SEQ ID NO: 707
  mat_peptide (1)..(42): gastric inhibitory polypeptide

SEQ ID NO: 1005 - protein, 29 aa, Artificial sequence
  Synthetic polypeptide
  MISC_FEATURE: Analog 61
  MISC_FEATURE (16)..(20): Lactam bridge between residues 16 and 20.
HSQGTFTSDYSKYLDEIHQKEFIAWLMNT

SEQ ID NO: 1006 - protein, 29 aa, Artificial sequence
  Synthetic polypeptide
  MISC_FEATURE: Analog 62
  MISC_FEATURE (16)..(20): Lactam bridge between residues 16 and 20.
HSQGTFTSDYSIYLDEIHQKEFIAWLMNT

SEQ ID NO: 1007 - protein, 29 aa, Artificial sequence
  Synthetic polypeptide
  MISC_FEATURE: Analog 63
  MISC_FEATURE (12)..(16): Lactam bridge between residues 12 and 16.
HSQGTFTSDYSKYLDEIHQKEFIAWLMNT

SEQ ID NO: 1008 - protein, 29 aa, Artificial sequence
  Synthetic polypeptide
  MISC_FEATURE: Analog 66
HSQGTFTSDYSKYLDEIHQKEFIAWLLAQ

SEQ ID NO: 1009 - protein, 29 aa, Artificial sequence
  Synthetic polypeptide
  MISC_FEATURE: Analog 68
HSQGTFTSDYSKYLDKIHQEEFIAWLMNT

SEQ ID NO: 1010 - protein, 29 aa, Artificial sequence
  Synthetic polypeptide
  MISC_FEATURE: Analog 69
  MISC_FEATURE (16)..(20): Lactam bridge between residues 16 and 20
HSQGTFTSDYSKYLDKIHQEEFIAWLMNT

SEQ ID NO: 1011 - protein, 29 aa, Artificial sequence
  Synthetic polypeptide
  MISC_FEATURE: Analog 84
  MISC_FEATURE (16)..(20): Lactam bridge between residues 16 and 20
HSQGTFTSDYSIYLDEIHQKEFICWLLAQ

SEQ ID NO: 1012 - protein, 29 aa, Artificial sequence
  Synthetic polypeptide
  MISC_FEATURE: Analog 85
  MISC_FEATURE (16)..(20): Lactam bridge between residues 16 and 20
  MISC_FEATURE (24)..(24): PEG (20kDa) covalently attached to Cysteine
HSQGTFTSDYSIYLDEIHQKEFICWLLAQ

SEQ ID NO: 1013 - protein, 29 aa, Artificial sequence
  Synthetic polypeptide
  MISC_FEATURE: Analog 92
HSQGTFTSDYSIYLDEKHQKEFIAWLLAQ

SEQ ID NO: 1014 - protein, 29 aa, Artificial sequence
  Synthetic polypeptide
  MISC_FEATURE: Analog 93
  MISC_FEATURE (16)..(20): Lactam bridge between residues 16 and 20
  MISC_FEATURE (17)..(21): Lactam bridge between residues 17 and 21
HSQGTFTSDYSIYLDEKHQKEFIAWLLAQ

SEQ ID NO: 1015 - protein, 29 aa, Artificial sequence
  Synthetic polypeptide
  MISC_FEATURE: Analog 95
  MISC_FEATURE (16)..(20): Lactam bridge between residues 16 and 20
HAEGTFISDYSIAMDEIHQKDFVNWLLAQ

SEQ ID NO: 1016 - protein, 29 aa, Artificial sequence
  Synthetic polypeptide
  MISC_FEATURE: Analog 96
  MISC_FEATURE (16)..(20): Lactam bridge between residues 16 and 20
YAEGTFISDYSIAMDEIHQKDFVNWLLAQ

SEQ ID NO: 1017 - protein, 29 aa, Artificial sequence
  Synthetic polypeptide
  MISC_FEATURE: Analog 97
  MISC_FEATURE (16)..(20): Lactam bridge between residues 16 and 20
HAEGTFTSDYSIYMDEIHQKDFVNWLLAQ

SEQ ID NO: 1018 - protein, 29 aa, Artificial sequence
  Synthetic polypeptide
  MISC_FEATURE: Analog 98
  MISC_FEATURE (16)..(20): Lactam bridge between residues 16 and 20
YAEGTFTSDYSIYMDEIHQKDFVNWLLAQ

SEQ ID NO: 1019 - protein, 42 aa, Artificial sequence
  Synthetic polypeptide
  MISC_FEATURE: Analog 99
YAEGTFISDYSIAMDKIHQQDFVNWLLAQKGKKNWLKHNITQ

SEQ ID NO: 1020 - protein, 42 aa, Artificial sequence
  Synthetic polypeptide
  MISC_FEATURE: Analog 100
  MOD_RES (2)..(2): Xaa is Aib
YXEGTFISDYSIAMDKIHQQDFVNWLLAQKGKKNWLKHNITQ

SEQ ID NO: 1021 - protein, 42 aa, Artificial sequence
  Synthetic polypeptide
  MISC_FEATURE: Analog 101
YAPGTFISDYSIAMDKIHQQDFVNWLLAQKGKKNWLKHNITQ

SEQ ID NO: 1022 - protein, 42 aa, Artificial sequence
  Synthetic polypeptide
  MISC_FEATURE: Analog 102
  MOD_RES (2)..(2): Xaa is Aib
YXEGTFISDYSIAMDKIHQQDFVCWLLAQKGKKNWLKHNITQ

SEQ ID NO: 1023 - protein, 42 aa, Artificial sequence
  Synthetic polypeptide
  MISC_FEATURE: Analog 104
YAPGTFISDYSIAMDKIHQQDFVCWLLAQKGKKNWLKHNITQ

SEQ ID NO: 1024 - protein, 42 aa, Artificial sequence; identical to SEQ ID NO: 1023
  Synthetic polypeptide
  MISC_FEATURE: Analog 105
  MISC_FEATURE (24)..(24): PEG (40kDa) attached to Cysteine

SEQ ID NO: 1025 - protein, 29 aa, Artificial sequence
  Synthetic polypeptide
  MISC_FEATURE: Analog 106
YAEGTFISDYSIAMDKIHQQDFVNWLLAQ

SEQ ID NO: 1026 - protein, 29 aa, Artificial sequence
  Synthetic polypeptide
  MISC_FEATURE: Analog 107
  MISC_FEATURE (16)..(20): Lactam bridge between residues 16 and 20
HSQGTFISDYSKYLDEIHQKEFIAWLMNT

SEQ ID NO: 1027 - protein, 29 aa, Artificial sequence
  Synthetic polypeptide
  MISC_FEATURE: Analog 108
  MISC_FEATURE (16)..(20): Lactam bridge between residues 16 and 20
HSQGTFISDYSKALDEIHQKEFIAWLMNT

SEQ ID NO: 1028 - protein, 29 aa, Artificial sequence
  Synthetic polypeptide
  MISC_FEATURE: Analog 109
  MISC_FEATURE (16)..(20): Lactam bridge between residues 16 and 20
YSQGTFTSDYSKYLDEIHQKDFVNWLLAQ

SEQ ID NO: 1029 - protein, 29 aa, Artificial sequence
  Synthetic polypeptide
  MISC_FEATURE: Analog 110
  MISC_FEATURE (16)..(20): Lactam bridge between residues 16 and 20
YSQGTFTSDYSIYLDEIHQKDFVNWLLAQ

SEQ ID NO: 1030 - protein, 29 aa, Artificial sequence
  Synthetic polypeptide
  MISC_FEATURE: Analog 111
  MISC_FEATURE (16)..(20): Lactam bridge between residues 16 and 20
HSQGTFTSDYSKYLDEIHQKDFVNWLLAQ

SEQ ID NO: 1031 - protein, 24 aa, Artificial sequence
  Synthetic polypeptide
  MISC_FEATURE: Analog 113
  MOD_RES (1)..(1): Xaa is 3-phenyllactic acid
  MISC_FEATURE (11)..(15): Lactam bridge between residues 11 and 15
XISDYSIAMDEIHQKDFVNWLLAQ

SEQ ID NO: 1032 - protein, 24 aa, Artificial sequence
  Synthetic polypeptide
  MISC_FEATURE: Analog 114
  MOD_RES (1)..(1): Xaa is 3-phenyllactic acid
  MISC_FEATURE (11)..(15): Lactam bridge between residues 11 and 15
XTSDYSKYLDEIHQKDFVNWLLAQ

SEQ ID NO: 1033 - protein, 39 aa, Artificial sequence
  Synthetic polypeptide
  MISC_FEATURE: Analog 115
  MISC_FEATURE (16)..(20): Lactam bridge between residues 16 and 20
HSQGTFTSDYSKYLDEIHQKDFVNWLLAGGPSSGAPPPS

SEQ ID NO: 1034 - protein, 39 aa, Artificial sequence
  Synthetic polypeptide
  MISC_FEATURE: Analog 116
  MISC_FEATURE (16)..(20): Lactam bridge between residues 16 and 20
YSQGTFTSDYSKYLDEIHQKDFVNWLLAGGPSSGAPPPS

SEQ ID NO: 1035 - protein, 29 aa, Artificial sequence
  Synthetic polypeptide
  MISC_FEATURE: Analog 118
  MISC_FEATURE (16)..(20): Lactam bridge between residues 16 and 20
YSQGTFTSDYSKYLDEIHQKEFVNWLLAQ

SEQ ID NO: 1036 - protein, 39 aa, Artificial sequence
  Synthetic polypeptide
  MISC_FEATURE: Analog 120
  MISC_FEATURE (16)..(20): Lactam bridge between residues 16 and 20
YSQGTFTSDYSKYLDEQAAKEFIAWLMNGGPSSGAPPPS

SEQ ID NO: 1037 - protein, 29 aa, Artificial sequence
  Synthetic polypeptide
  MISC_FEATURE: Analog 124
  MISC_FEATURE (16)..(20): Lactam bridge between residues 16 and 20
HSQGTFTSDYSIYMDEIHQKDFVNWLLAQ

SEQ ID NO: 1038 - protein, 29 aa, Artificial sequence
  Synthetic polypeptide
  MISC_FEATURE: Analog 125
  MISC_FEATURE (16)..(20): Lactam bridge between residues 16 and 20
YSQGTFTSDYSIYMDEIHQKDFVNWLLAQ

SEQ ID NO: 1039 - protein, 39 aa, Artificial sequence
  Synthetic polypeptide
  MISC_FEATURE: Analog 127
  MISC_FEATURE (16)..(20): Lactam bridge between residues 16 and 20
YSQGTFTSDYSKYLDEQAAKEFVNWLLAGGPSSGAPPPS

SEQ ID NO: 1040 - protein, 39 aa, Artificial sequence
  Synthetic polypeptide
  MISC_FEATURE: Analog 128
  MISC_FEATURE (16)..(20): Lactam bridge between residues 16 and 20
HSQGTFTSDYSKYLDEIHQKDFIAWLMNGGPSSGAPPPS

SEQ ID NO: 1041 - protein, 39 aa, Artificial sequence
  Synthetic polypeptide
  MISC_FEATURE: Analog 129
  MISC_FEATURE (16)..(20): Lactam bridge between residues 16 and 20
YSQGTFTSDYSKYLDEIHQKDFIAWLMNGGPSSGAPPPS

SEQ ID NO: 1042 - protein, 39 aa, Artificial sequence
  Synthetic polypeptide
  MISC_FEATURE: Analog 139
  MISC_FEATURE (16)..(20): Lactam bridge between residues 16 and 20
YSQGTFTSDYSKYLDEQAAKEFIAWLLAGGPSSGAPPPS

SEQ ID NO: 1043 - protein, 39 aa, Artificial sequence
  Synthetic polypeptide
  MISC_FEATURE: Analog 140
  MISC_FEATURE (16)..(20): Lactam bridge between residues 16 and 20
YSQGTFTSDYSIYLDEQAAKEFVNWLLAGGPSSGAPPPS

SEQ ID NO: 1044 - protein, 39 aa, Artificial sequence
  Synthetic polypeptide
  MISC_FEATURE: Analog 141
  MISC_FEATURE (16)..(20): Lactam bridge between residuess 16 and 20
YSQGTFTSDYSKYMDEQAAKEFVNWLLAGGPSSGAPPPS

SEQ ID NO: 1045 - protein, 39 aa, Artificial sequence
  Synthetic polypeptide
  MISC_FEATURE: Analog 142
  MISC_FEATURE (16)..(20): Lactam bridge between residues 16 and 20
YAEGTFTSDYSIYMDEQAAKEFVNWLLAGGPSSGAPPPS

SEQ ID NO: 1046 - protein, 39 aa, Artificial sequence
  Synthetic polypeptide
  MISC_FEATURE: Analog 143
  MISC_FEATURE (16)..(20): Lactam bridge between residues 16 and 20
YSQGTFTSDYSKYLDERRAKEFVNWLLAGGPSSGAPPPS

SEQ ID NO: 1047 - protein, 39 aa, Artificial sequence
  Synthetic polypeptide
  MISC_FEATURE: Analog 144
  MISC_FEATURE (16)..(20): Lactam bridge between residues 16 and 20
YAQGTFTSDYSIYMDEQAAKEFVNWLLAGGPSSGAPPPS

SEQ ID NO: 1048 - protein, 39 aa, Artificial sequence
  Synthetic polypeptide
  MISC_FEATURE: Analog 145
  MISC_FEATURE (16)..(20): Lactam bridge between residues 16 and 20
YAQGTFISDYSKYLDEQAAKEFVNWLLAGGPSSGAPPPS

SEQ ID NO: 1049 - protein, 39 aa, Artificial sequence; identical to SEQ ID NO: 1048
  Synthetic polypeptide
  MISC_FEATURE: Analog 146
  MISC_FEATURE (16)..(20): Lactam bridge between residues 16 and 20

SEQ ID NO: 1050 - protein, 39 aa, Artificial sequence
  Synthetic polypeptide
  MISC_FEATURE: Analog 147
  MISC_FEATURE (16)..(20): Lactam bridge between residues 16 and 20
YSQGTFTSDYSIYLDEQAAKEFIAWLLAGGPSSGAPPPS

SEQ ID NO: 1051 - protein, 39 aa, Artificial sequence
  Synthetic polypeptide
  MISC_FEATURE: Analog 148
  MISC_FEATURE (16)..(20): Lactam bridge between residues 16 and 20
YSEGTFTSDYSIYLDEQAAKEFIAWLLAGGPSSGAPPPS

SEQ ID NO: 1052 - protein, 39 aa, Artificial sequence
  Synthetic polypeptide
  MISC_FEATURE: Analog 149
  MISC_FEATURE (16)..(20): Lactam bridge between residues 16 and 20
YAEGTFTSDYSIYLDEQAAKEFVNWLLAGGPSSGAPPPS

SEQ ID NO: 1053 - protein, 39 aa, Artificial sequence
  Synthetic polypeptide
  MISC_FEATURE: Analog 150
  MISC_FEATURE (16)..(20): Lactam bridge between residues 16 and 20
YSQGTFISDYSIYLDEQAAKEFVNWLLAGGPSSGAPPPS

SEQ ID NO: 1054 - protein, 39 aa, Artificial sequence; identical to SEQ ID NO: 1042
  Synthetic polypeptide
  MISC_FEATURE: Analog 151
  MISC_FEATURE (16)..(20): Lactam bridge between residues 16 and 20

SEQ ID NO: 1055 - protein, 39 aa, Artificial sequence
  Synthetic polypeptide
  MISC_FEATURE: Analog 152
  MOD_RES (2)..(2): Xaa is Aib
  MISC_FEATURE (16)..(20): Lactam bridge between residues 16 and 20
YXQGTFTSDYSIYLDEQAAKEFVNWLLAGGPSSGAPPPS

SEQ ID NO: 1056 - protein, 39 aa, Artificial sequence
  Synthetic polypeptide
  MISC_FEATURE: Analog 154
  MOD_RES (1)..(1): Xaa is hippuric acid
  MISC_FEATURE (16)..(20): Lactam bridge between residues 16 and 20
XSQGTFTSDYSIYLDEQAAKEFVNWLLAGGPSSGAPPPS

SEQ ID NO: 1057 - protein, 39 aa, Artificial sequence; identical to SEQ ID NO: 1039
  Synthetic polypeptide
  MISC_FEATURE: Analog 155
  MISC_FEATURE (12)..(16): Lactam bridge between residues 12 and 16

SEQ ID NO: 1058 - protein, 39 aa, Artificial sequence
  Synthetic polypeptide
  MISC_FEATURE: Analog 156
  MISC_FEATURE (20)..(24): Lactam bridge between residues 20 and 24
YSQGTFTSDYSIYLDEQAAKEFVEWLLAGGPSSGAPPPS

SEQ ID NO: 1059 - protein, 39 aa, Artificial sequence
  Synthetic polypeptide
  MISC_FEATURE: Analog 157
  MISC_FEATURE (24)..(28): Lactam bridge between residues 24 and 28
YSQGTFTSDYSIYLDEQAAKEFVEWLLKGGPSSGAPPPS

SEQ ID NO: 1060 - protein, 39 aa, Artificial sequence
  Synthetic polypeptide
  MISC_FEATURE: Analog 158
  MOD_RES (2)..(2): Xaa is Aib
  MISC_FEATURE (16)..(20): Lactam bridge between residues 16 and 20
YXQGTFTSDYSIYLDEQAAKEFVCWLLAGGPSSGAPPPS

SEQ ID NO: 1061 - protein, 39 aa, Artificial sequence
  Synthetic polypeptide
  MISC_FEATURE: Analog 162
  MOD_RES (2)..(2): Xaa is Aib
  MISC_FEATURE (16)..(20): Lactam bridge between residues 16 and 20
YXQGTFTSDYSYYLDEQAVKEFVNWLIAGGPSSGAPPPS

SEQ ID NO: 1062 - protein, 29 aa, Artificial sequence
  Synthetic polypeptide
  MISC_FEATURE: Analog 163
  MISC_FEATURE (16)..(20): Lactam bridge between residues 16 and 20
YSQGTFTSDYSIYLDEQAAKEFVNWLLAG

SEQ ID NO: 1063 - protein, 29 aa, Artificial sequence
  Synthetic polypeptide
  MISC_FEATURE: Analog 164
  MOD_RES (2)..(2): Xaa is Aib
  MISC_FEATURE (16)..(20): Lactam bridge between residues 16 and 20
YXQGTFTSDYSIYLDEQAAKEFVNWLLAG

SEQ ID NO: 1064 - protein, 40 aa, Artificial sequence
  Synthetic polypeptide
  MISC_FEATURE: Analog 165
  MOD_RES (2)..(2): Xaa is Aib
  MISC_FEATURE (16)..(20): Lactam bridge between residues 16 and 20
YXQGTFTSDYSIYLDEQAAKEFVNWLLAGGPSSGAPPPSC

SEQ ID NO: 1065 - protein, 40 aa, Artificial sequence; identical to SEQ ID NO: 1064
  Synthetic polypeptide
  MISC_FEATURE: Analog 166
  MOD_RES (2)..(2): Xaa is d-alanine
  MISC_FEATURE (16)..(20): Lactam bridge between residues 16 and 20

SEQ ID NO: 1066 - protein, 39 aa, Artificial sequence
  Synthetic polypeptide
  MISC_FEATURE: Analog 167
  MISC_FEATURE (17)..(20): Lactam bridge between residues 17 and 20
YSQGTFTSDYSIYLDEEAAKEFVNWLLAGGPSSGAPPPS

SEQ ID NO: 1067 - protein, 39 aa, Artificial sequence
  Synthetic polypeptide
  MISC_FEATURE: Analog 168
  MISC_FEATURE (18)..(21): Lactam bridge between residues 18 and 21
YSQGTFTSDYSIYLDEQKAKEFVNWLLAGGPSSGAPPPS

SEQ ID NO: 1068 - protein, 29 aa, Artificial sequence
  Synthetic polypeptide
  MISC_FEATURE: Analog 169
  MOD_RES (2)..(2): Xaa is Aib
  MISC_FEATURE (16)..(20): Lactam bridge between residues 16 and 20
YXQGTFTSDYSIYLDEQAAKEFVCWLLAG

SEQ ID NO: 1069 - protein, 40 aa, Artificial sequence; identical to SEQ ID NO: 1064
  Synthetic polypeptide
  MISC_FEATURE: Analog 170
  MOD_RES (2)..(2): Xaa is Aib
  MISC_FEATURE (16)..(20): Lactam bridge between residues 16 and 20
  MISC_FEATURE (40)..(40): PEG (40kDa) covalently attached to Cysteine

SEQ ID NO: 1070 - protein, 29 aa, Artificial sequence
  Synthetic polypeptide
  MISC_FEATURE: Analog 172
  MOD_RES (2)..(2): Xaa is Aib
  MISC_FEATURE (16)..(20): Lactam bridge between residues 16 and 20
  MISC_FEATURE (24)..(24): PEG (40kDa) covalently attached to Cysteine
YXQGTFTSDYSIYLDEQAAKEFVCWLLAG

SEQ ID NO: 1071 - protein, 40 aa, Artificial sequence; identical to SEQ ID NO: 761
  Synthetic polypeptide
  MISC_FEATURE: Analog 174
  MOD_RES (2)..(2): Xaa is Aib
  MISC_FEATURE (16)..(20): Lactam bridge between residues 16 and 20

SEQ ID NO: 1072 - protein, 39 aa, Artificial sequence; identical to SEQ ID NO: 1060
  Synthetic polypeptide
  MISC_FEATURE: Analog 175
  MOD_RES (2)..(2): Xaa is Aib
  MISC_FEATURE (16)..(20): Lactam bridge between residues 16 and 20
  MISC_FEATURE (24)..(24): PEG (40kDa) covalently attached to Cysteine

SEQ ID NO: 1073 - protein, 40 aa, Artificial sequence
  Synthetic polypeptide
  MISC_FEATURE: Analog 176
  MOD_RES (2)..(2): Xaa is Aib
  MISC_FEATURE (16)..(20): Lactam bridge between residues 16 and 20
YXQGTFISDYSIYLDEQAAKEFVNWLLAGGPSSGAPPPSC

SEQ ID NO: 1074 - protein, 29 aa, Artificial sequence
  Synthetic polypeptide
  MISC_FEATURE: Analog 177
  MOD_RES (2)..(2): Xaa is Aib
  MISC_FEATURE (16)..(20): Lactam bridge between residues 16 and 20
YXQGTFISDYSIYLDEQAAKEFVCWLLAG

SEQ ID NO: 1075 - protein, 40 aa, Artificial sequence; identical to SEQ ID NO: 761
  Synthetic polypeptide
  MISC_FEATURE: Analog 178
  MOD_RES (2)..(2): Xaa is Aib
  MISC_FEATURE (16)..(20): Lactam bridge between residues 16 and 20
  MISC_FEATURE (40)..(40): PEG (40kDa) covalently attached to Cysteine

SEQ ID NO: 1076 - protein, 29 aa, Artificial sequence
  Synthetic polypeptide
  MISC_FEATURE: Analog 179
  MOD_RES (2)..(2): Xaa is Aib
  MISC_FEATURE (16)..(20): Lactam bridge between residues 16 and 20
  MISC_FEATURE (24)..(24): PEG (40kDa) covalently attached to Cysteine
YXQGTFISDYSIYLDEQAAKEFVCWLLAG

SEQ ID NO: 1077 - protein, 40 aa, Artificial sequence; identical to SEQ ID NO: 1073
  Synthetic polypeptide
  MISC_FEATURE: Analog 182
  MOD_RES (2)..(2): Xaa is Aib
  MISC_FEATURE (16)..(20): Lactam bridge between residues 16 and 20
  MISC_FEATURE (40)..(40): PEG (40kDa) covalently attached to Cysteine

SEQ ID NO: 1078 - protein, 29 aa, Artificial sequence
  Synthetic polypeptide
  MISC_FEATURE: Analog 186
  MOD_RES (2)..(2): Xaa is Aib
  MISC_FEATURE (16)..(20): Lactam bridge between residues 16 and 20
  MISC_FEATURE (24)..(24): PEG (40kDa) covalently attached to Cysteine
YXQGTFTSDYSIYLDEQAAKEFVCWLMNG

SEQ ID NO: 1079 - protein, 39 aa, Artificial sequence; identical to SEQ ID NO: 1055
  Synthetic polypeptide
  MISC_FEATURE: Analog 191
  MOD_RES (2)..(2): Xaa is Aib

SEQ ID NO: 1080 - protein, 34 aa, Artificial sequence
  Synthetic polypeptide
  MISC_FEATURE: Analog 192
FTSDYSIYLDEQAAKEFVNWLLAGGPSSGAPPPS

SEQ ID NO: 1081 - protein, 38 aa, Artificial sequence
  Synthetic polypeptide
  MISC_FEATURE: Analog 194
  MOD_RES (1)..(1): Xaa is Aib
XQGTFTSDYSIYLDEEAVRLFVNWLLAGGPSSGAPPPS

SEQ ID NO: 1082 - protein, 26 aa, Artificial sequence
  Synthetic polypeptide
  MISC_FEATURE: Analog 197
  MISC_FEATURE (13)..(17): Lactam bridge between residues 13 and 17
GTFTSDYSIYLDEQAAKEFVNWLLAG

SEQ ID NO: 1083 - protein, 28 aa, Artificial sequence
  Synthetic polypeptide
  MISC_FEATURE: Analog 198
  MOD_RES (1)..(1): Xaa is Aib
  MISC_FEATURE (15)..(19): Lactam bridge between residues 15 and 19
XQGTFTSDYSIYLDEQAAKEFVNWLLAG

SEQ ID NO: 1084 - protein, 40 aa, Artificial sequence
  Synthetic polypeptide
  MISC_FEATURE: Analog 199
  MOD_RES (2)..(2): Xaa is Aib
  MISC_FEATURE (16)..(20): Lactam bridge between residues 16 and 20
YXQGTFVSDYSIYLDEQAAKEFVNWLLAGGPSSGAPPPSC

SEQ ID NO: 1085 - protein, 40 aa, Artificial sequence
  Synthetic polypeptide
  MISC_FEATURE: Analog 200
  MOD_RES (2)..(2): Xaa is Aib
  MISC_FEATURE (16)..(20): Lactam bridge between residues 16 and 20
  MOD_RES (27)..(27): Xaa is Nle
YXQGTFTSDYSIYLDEQAAKEFVNWLXAGGPSSGAPPPSC

SEQ ID NO: 1086 - protein, 39 aa, Artificial sequence
  Synthetic polypeptide
  MISC_FEATURE: Analog 201
  MOD_RES (2)..(2): Xaa is Aib
YXQGTFTSDYSIYLDEEAVRLFVNWLLAGGPSSGAPPPS

SEQ ID NO: 1087 - protein, 40 aa, Artificial sequence; identical to SEQ ID NO: 1084
  Synthetic polypeptide
  MISC_FEATURE: Analog 202
  MOD_RES (2)..(2): Xaa is Aib
  MISC_FEATURE (16)..(20): Lactam bridge between residues 16 and 20
  MISC_FEATURE (40)..(40): PEG (40kDa) covalently attached to Cysteine

SEQ ID NO: 1088 - protein, 40 aa, Artificial sequence; identical to SEQ ID NO: 1085
  Synthetic polypeptide
  MISC_FEATURE: Analog 203
  MOD_RES (2)..(2): Xaa is Aib
  MISC_FEATURE (16)..(20): Lactam bridge between residues 16 and 20
  MOD_RES (27)..(27): Xaa is Nle
  MISC_FEATURE (40)..(40): PEG (40kDa) covalently attached to Cysteine

SEQ ID NO: 1089 - protein, 40 aa, Artificial sequence
  Synthetic polypeptide
  MISC_FEATURE: Analog 204
  MOD_RES (2)..(2): Xaa is Aib
  MISC_FEATURE (16)..(20): Lactam bridge between residues 16 and 20
YXEGTFTSDYSIYLDEQAAKEFVNWLLAGRPSSGAPPPSC

SEQ ID NO: 1090 - protein, 40 aa, Artificial sequence; identical to SEQ ID NO: 1089
  Synthetic polypeptide
  MISC_FEATURE: Analog 205
  MOD_RES (2)..(2): Xaa is Aib
  MISC_FEATURE (16)..(20): Lactam bridge between residues 16 and 20
  MISC_FEATURE (40)..(40): PEG (40kDa) covalently attached to Cysteine

SEQ ID NO: 1091 - protein, 43 aa, Artificial sequence
  Synthetic polypeptide
  MISC_FEATURE: Analog 206
  MOD_RES (2)..(2): Xaa is Aib
  MISC_FEATURE (16)..(20): Lactam bridge between residues 16 and 20
YXEGTFTSDYSIYLDEQAAKEFVNWLLAGKGKKNWLKHNITQC

SEQ ID NO: 1092 - protein, 43 aa, Artificial sequence
  Synthetic polypeptide
  MISC_FEATURE: Analog 207
  MOD_RES (2)..(2): Xaa is Aib
  MISC_FEATURE (16)..(20): Lactam bridge between residues 16 and 20
YXQGTFTSDYSIYLDEQAAKEFVNWLLAGKGKKNWLKHNITQC

SEQ ID NO: 1093 - protein, 43 aa, Artificial sequence; identical to SEQ ID NO: 1091
  Synthetic polypeptide
  MISC_FEATURE: Analog 208
  MOD_RES (2)..(2): Xaa is Aib
  MISC_FEATURE (16)..(20): Lactam bridge between residues 16 and 20
  MISC_FEATURE (43)..(43): PEG (40kDa) covalently attached to Cysteine

SEQ ID NO: 1094 - protein, 40 aa, Artificial sequence
  Synthetic polypeptide
  MISC_FEATURE: Analog 209
  MOD_RES (2)..(2): Xaa is Aib
  MISC_FEATURE (9)..(12): Lactam bridge between residues 9 and 12
  MISC_FEATURE (16)..(20): Lactam bridge between residues 16 and 20
YXQGTFTSEYSKYLDEQAAKEFVNWLLAGGPSSGAPPPSC

SEQ ID NO: 1095 - protein, 10 aa, Artificial sequence
  Synthetic polypeptide
  MISC_FEATURE: CEX
GPSSGAPPPS

SEQ ID NO: 1096 - protein, 11 aa, Artificial sequence
  Synthetic polypeptide
  MISC_FEATURE (1)..(1): Xaa is any amino acid
XGPSSGAPPPS

SEQ ID NO: 1097 - protein, 8 aa, Artificial sequence
  Synthetic polypeptide
KRNRNNIA

SEQ ID NO: 1098 - protein, 4 aa, Artificial sequence
  Synthetic polypeptide
KRNR

SEQ ID NO: 1099 - protein, 40 aa, Artificial Sequence; identical to SEQ ID NO: 760
  Synthetic polypeptide
  MOD_RES (2)..(2): Xaa is Aib
  MOD_RES (20)..(20): Xaa is Aib
  MISC_FEATURE (40)..(40): PEG (40kDa) covalently attached to Cysteine
  MISC_FEATURE (40)..(40): C-terminal amidation

SEQ ID NO: 1100 - protein, 40 aa, Artificial Sequence; identical to SEQ ID NO: 759
  Synthetic polypeptide
  MOD_RES (2)..(2): Xaa is Aib
  MOD_RES (20)..(20): Xaa is Aib
  MISC_FEATURE (24)..(24): PEG (40kDa) covalently attached to Cysteine
  MISC_FEATURE (40)..(40): C-terminal amidation

SEQ ID NO: 1101 - protein, 40 aa, Artificial Sequence; identical to SEQ ID NO: 759
  Synthetic polypeptide
  MOD_RES (2)..(2): Xaa is Aib
  MOD_RES (20)..(20): Xaa is Aib
  MISC_FEATURE (24)..(24): PEG (40kDa) covalently attached to Cysteine
  MISC_FEATURE (40)..(40): 16 Carbon fatty acyl group covalently attached to Lysine
  MISC_FEATURE (40)..(40): C-terminal amidation

SEQ ID NO: 1102 - protein, 40 aa, Artificial Sequence; identical to SEQ ID NO: 759
  Synthetic polypeptide
  MOD_RES (2)..(2): Xaa is Aib
  MOD_RES (20)..(20): Xaa is Aib
  MISC_FEATURE (24)..(24): PEG (40kDa) covalently attached to Cysteine
  MISC_FEATURE (40)..(40): 14 Carbon fatty acyl group covalently attached Lysine
  MISC_FEATURE (40)..(40): C-terminal amidation

SEQ ID NO: 1103 - protein, 40 aa, Artificial Sequence; identical to SEQ ID NO: 759
  Synthetic polypeptide
  MOD_RES (2)..(2): Xaa is Aib
  MOD_RES (20)..(20): Xaa is Aib
  MISC_FEATURE (24)..(24): PEG (40kDa) covalently attached to Cysteine
  MISC_FEATURE (40)..(40): 18 Carbon fatty acyl group covalently attached to Lysine
  MISC_FEATURE (40)..(40): C-terminal amidation

SEQ ID NO: 1104 - protein, 40 aa, Artificial Sequence; identical to SEQ ID NO: 756
  Synthetic polypeptide
  MOD_RES (2)..(2): Xaa is Aib
  MOD_RES (20)..(20): Xaa is Aib
  MISC_FEATURE (40)..(40): 14 Carbon fatty acyl group covalently attached to Lysine
  MISC_FEATURE (40)..(40): C-terminal amidation

SEQ ID NO: 1105 - protein, 40 aa, Artificial Sequence; identical to SEQ ID NO: 756
  Synthetic polypeptide
  MOD_RES (2)..(2): Xaa is Aib
  MOD_RES (20)..(20): Xaa is Aib
  MISC_FEATURE (40)..(40): 16 Carbon fatty acyl group covalently attached Lysine
  MISC_FEATURE (40)..(40): C-terminal amidation

SEQ ID NO: 1106 - protein, 40 aa, Artificial Sequence; identical to SEQ ID NO: 756
  Synthetic polypeptide
  MOD_RES (2)..(2): Xaa is Aib
  MOD_RES (20)..(20): Xaa is Aib
  MISC_FEATURE (40)..(40): 18 Carbon fatty acyl group covalently attached to Lysine
  MISC_FEATURE (40)..(40): C-terminal amidation

SEQ ID NO: 1107 - protein, 40 aa, Artificial Sequence
  Synthetic polypeptide
  MOD_RES (2)..(2): Xaa is Aib
  MOD_RES (20)..(20): Xaa is Aib
  MISC_FEATURE (40)..(40): C-terminal amidation
YXQGTFTSDYSIYLDKQAAXEFVNWLLAGGPSSGAPPPSC

SEQ ID NO: 1108 - protein, 40 aa, Artificial Sequence; identical to SEQ ID NO: 1107
  Synthetic polypeptide
  MOD_RES (2)..(2): Xaa is Aib
  MOD_RES (20)..(20): Xaa is Aib
  MISC_FEATURE (40)..(40): PEG (40kDa) attached to Cysteine
  MISC_FEATURE (40)..(40): C-terminal amidation

SEQ ID NO: 1109 - protein, 40 aa, Artificial Sequence; identical to SEQ ID NO: 760
  Synthetic polypeptide
  MOD_RES (2)..(2): Xaa is Aib
  MOD_RES (20)..(20): Xaa is Aib
  MISC_FEATURE (40)..(40): C-terminal amidation

SEQ ID NO: 1110 - protein, 29 aa, Artificial Sequence
  Synthetic polypeptide
  MOD_RES (2)..(2): Xaa is Aib
  MOD_RES (20)..(20): Xaa is Aib
  MISC_FEATURE (29)..(29): C-terminal amidation
YXQGTFTSDYSIYLDKQAAXEFVCWLLAG

SEQ ID NO: 1111 - protein, 40 aa, Artificial Sequence; identical to SEQ ID NO: 756
  Synthetic polypeptide
  MOD_RES (2)..(2): Xaa is Aib
  MOD_RES (20)..(20): Xaa is Aib
  MISC_FEATURE (40)..(40): C-terminal amidation

SEQ ID NO: 1112 - protein, 29 aa, Artificial Sequence
  Synthetic polypeptide
  MISC_FEATURE (2)..(2): Xaa is Aib
  MISC_FEATURE (20)..(20): Xaa is Aib
YXQGTFTSDYSIYLDKQAAXEFVNWLLAG

SEQ ID NO: 1113 - protein, 39 aa, Artificial Sequence
  Synthetic polypeptide
  MOD_RES (2)..(2): Xaa is Aib
  MOD_RES (20)..(20): Xaa is Aib
  MISC_FEATURE (24)..(24): 14 Carbon fatty acyl group covalently attached to Lysine
  MISC_FEATURE (39)..(39): C-terminal amidation
YXEGTFTSDYSIYLDKQAAXEFVKWLLAGGPSSGAPPPS

SEQ ID NO: 1114 - protein, 39 aa, Artificial Sequence; identical to SEQ ID NO: 1113
  Synthetic polypeptide
  MOD_RES (2)..(2): Xaa is Aib
  MOD_RES (20)..(20): Xaa is Aib
  MISC_FEATURE (24)..(24): 16 Carbon fatty acyl group covalently attached to Lysine
  MISC_FEATURE (39)..(39): C-terminal amidation

SEQ ID NO: 1115 - protein, 39 aa, Artificial Sequence; identical to SEQ ID NO: 1113
  Synthetic polypeptide
  MOD_RES (2)..(2): Xaa is Aib
  MOD_RES (20)..(20): Xaa is Aib
  MISC_FEATURE (24)..(24): 18 Carbon fatty acyl group covalently attached to Lysine
  MISC_FEATURE (39)..(39): C-terminal amidation

SEQ ID NO: 1116 - protein, 39 aa, Artificial Sequence; identical to SEQ ID NO: 1113
  Synthetic polypeptide
  MOD_RES (2)..(2): Xaa is Aib
  MOD_RES (20)..(20): Xaa is Aib
  MISC_FEATURE (39)..(39): C-terminal amidation

SEQ ID NO: 1117 - protein, 39 aa, Artificial Sequence; identical to SEQ ID NO: 758
  Synthetic polypeptide
  MOD_RES (2)..(2): Xaa is Aib
  MISC_FEATURE (10)..(10): 14 Carbon fatty acyl group covalently attached to Lysine
  MOD_RES (20)..(20): Xaa is Aib
  MISC_FEATURE (39)..(39): C-terminal amidation

SEQ ID NO: 1118 - protein, 39 aa, Artificial Sequence; identical to SEQ ID NO: 758
  Synthetic polypeptide
  MOD_RES (2)..(2): Xaa is Aib
  MISC_FEATURE (10)..(10): 16 Carbon fatty acyl group covalently attached to Lysine
  MOD_RES (20)..(20): Xaa is Aib
  MISC_FEATURE (39)..(39): C-terminal amidation

SEQ ID NO: 1119 - protein, 39 aa, Artificial Sequence; identical to SEQ ID NO: 758
  Synthetic polypeptide
  MOD_RES (2)..(2): Xaa is Aib
  MISC_FEATURE (10)..(10): 18 Carbon fatty acyl group covalently attached to Lysine
  MOD_RES (20)..(20): Xaa is Aib
  MISC_FEATURE (39)..(39): C-terminal amidation

SEQ ID NO: 1120 - protein, 39 aa, Artificial Sequence; identical to SEQ ID NO: 758
  Synthetic polypeptide
  MOD_RES (2)..(2): Xaa is Aib
  MOD_RES (20)..(20): Xaa is Aib
  MISC_FEATURE (39)..(39): C-terminal amidation

SEQ ID NO: 1121 - protein, 40 aa, Artificial Sequence
  Synthetic polypeptide
  MOD_RES (2)..(2): Xaa is Aib
  MOD_RES (16)..(16): Xaa is Orn
  MOD_RES (20)..(20): Xaa is Aib
  MISC_FEATURE (40)..(40): C-terminal amidation
YXQGTFTSDYSIYLDXQAAXEFVNWLLAGGPSSGAPPPSC

SEQ ID NO: 1122 - protein, 40 aa, Artificial Sequence; identical to SEQ ID NO: 1121
  Synthetic polypeptide
  MOD_RES (2)..(2): Xaa is Aib
  MOD_RES (16)..(16): Xaa is 2,4-diaminobutyric acid
  MOD_RES (20)..(20): Xaa is Aib
  MISC_FEATURE (40)..(40): C-terminal amidation

SEQ ID NO: 1123 - protein, 40 aa, Artificial Sequence
  Synthetic polypeptide
  MOD_RES (2)..(2): Xaa is Aib
  MOD_RES (20)..(20): Xaa is Aib
  MISC_FEATURE (40)..(40): 14 Carbon fatty acyl group covalentaly attached to Lysine
  MISC_FEATURE (40)..(40): C-terminal amidation
YXQGTFTSDYSIYLDKQAAXEFVNWLLAGGPSSGAPPPSK

SEQ ID NO: 1124 - protein, 40 aa, Artificial Sequence; identical to SEQ ID NO: 1123
  Synthetic polypeptide
  MOD_RES (2)..(2): Xaa is Aib
  MOD_RES (20)..(20): Xaa is Aib
  MISC_FEATURE (40)..(40): 16 Carbon fatty acyl group covalently attached to Lysine
  MISC_FEATURE (40)..(40): C-terminal amidation

SEQ ID NO: 1125 - protein, 40 aa, Artificial Sequence; identical to SEQ ID NO: 1123
  Synthetic polypeptide
  MOD_RES (2)..(2): Xaa is Aib
  MOD_RES (20)..(20): Xaa is Aib
  MISC_FEATURE (40)..(40): 18 Carbon fatty acyl group covalently attached to Lysine
  MISC_FEATURE (40)..(40): C-terminal amidation

SEQ ID NO: 1126 - protein, 40 aa, Artificial Sequence; identical to SEQ ID NO: 1123
  Synthetic polypeptide
  MOD_RES (2)..(2): Xaa is Aib
  MOD_RES (20)..(20): Xaa is Aib
  MISC_FEATURE (40)..(40): C-terminal amidation

SEQ ID NO: 1127 - protein, 29 aa, Artificial Sequence
  Synthetic polypeptide
  MOD_RES (2)..(2): Xaa is Aib
  MOD_RES (20)..(20): Xaa is Aib
  MISC_FEATURE (24)..(24): PEG (40kDa) covalently attached to Cysteine
  MISC_FEATURE (29)..(29): C-terminal amidation
YXQGTFTSDYSIYLDKQAAXEFVCWLLAG

SEQ ID NO: 1128 - protein, 29 aa, Artificial Sequence
  Synthetic polypeptide
  MOD_RES (2)..(2): Xaa is Aib
  MISC_FEATURE (10)..(10): 14 Carbon fatty acyl group covalently attached to Lysine
  MOD_RES (20)..(20): Xaa is Aib
  MISC_FEATURE (29)..(29): C-terminal amidation
YXEGTFTSDKSIYLDKQAAXEFVNWLLAG

SEQ ID NO: 1129 - protein, 29 aa, Artificial Sequence
  Synthetic polypeptide
  MOD_RES (2)..(2): Xaa is Aib
  MISC_FEATURE (10)..(10): 16 Carbon fatty acyl group covalently attached to Lysine
  MOD_RES (20)..(20): Xaa is Aib
  MISC_FEATURE (29)..(29): C-terminal amidation
YXEGTFTSDKSIYLDKQAAXEFVNWLLAG

SEQ ID NO: 1130 - protein, 29 aa, Artificial Sequence
  Synthetic polypeptide
  MOD_RES (2)..(2): Xaa is Aib
  MISC_FEATURE (10)..(10): 18 Carbon fatty acyl group covalently attached to Lysine
  MOD_RES (20)..(20): Xaa is Aib
  MISC_FEATURE (29)..(29): C-terminal amidation
YXEGTFTSDKSIYLDKQAAXEFVNWLLAG

SEQ ID NO: 1131 - protein, 29 aa, Artificial Sequence
  Synthetic polypeptide
  MOD_RES (2)..(2): Xaa is Aib
  MOD_RES (20)..(20): Xaa is Aib
  MISC_FEATURE (29)..(29): C-terminal amidation
YXEGTFTSDKSIYLDKQAAXEFVNWLLAG

SEQ ID NO: 1132 - protein, 40 aa, Artificial Sequence; identical to SEQ ID NO: 766
  Synthetic polypeptide
  MOD_RES (2)..(2): Xaa is Aib
  MOD_RES (20)..(20): Xaa is Aib
  MISC_FEATURE (40)..(40): 14 Carbon fatty acyl group covalently attached to Lysine
  MISC_FEATURE (40)..(40): C-terminal amidation

SEQ ID NO: 1133 - protein, 40 aa, Artificial Sequence; identical to SEQ ID NO: 766
  Synthetic polypeptide
  MOD_RES (2)..(2): Xaa is Aib
  MOD_RES (20)..(20): Xaa is Aib
  MISC_FEATURE (40)..(40): 16 Carbon fatty acyl group covalently attached to Lysine
  MISC_FEATURE (40)..(40): C-terminal amidation

SEQ ID NO: 1134 - protein, 40 aa, Artificial Sequence; identical to SEQ ID NO: 766
  Synthetic polypeptide
  MOD_RES (2)..(2): Xaa is Aib
  MOD_RES (20)..(20): Xaa is Aib
  MISC_FEATURE (40)..(40): 18 Carbon fatty acyl group covalently attached to Lysine
  MISC_FEATURE (40)..(40): C-terminal amidation

SEQ ID NO: 1135 - protein, 40 aa, Artificial Sequence; identical to SEQ ID NO: 766
  Synthetic polypeptide
  MOD_RES (2)..(2): Xaa is Aib
  MOD_RES (20)..(20): Xaa is Aib
  MISC_FEATURE (40)..(40): C-terminal amidation

SEQ ID NO: 1136 - protein, 40 aa, Artificial Sequence; identical to SEQ ID NO: 766
  Synthetic polypeptide
  MOD_RES (2)..(2): Xaa is Aib
  MOD_RES (20)..(20): Xaa is Aib
  MISC_FEATURE (24)..(24): PEG (40kDa) covalently attached to Cysteine
  MISC_FEATURE (40)..(40): 14 Carbon fatty acyl group covalently attached to Lysine
  MISC_FEATURE (40)..(40): C-terminal amidation

SEQ ID NO: 1137 - protein, 40 aa, Artificial Sequence; identical to SEQ ID NO: 766
  Synthetic polypeptide
  MOD_RES (2)..(2): Xaa is Aib
  MOD_RES (20)..(20): Xaa is Aib
  MISC_FEATURE (24)..(24): PEG (40kDa) covalently attached to Cysteine
  MISC_FEATURE (40)..(40): 16 Carbon fatty acyl group covalently attached to Lysine
  MISC_FEATURE (40)..(40): C-terminal amidation

SEQ ID NO: 1138 - protein, 40 aa, Artificial Sequence; identical to SEQ ID NO: 766
  Synthetic polypeptide
  MOD_RES (2)..(2): Xaa is Aib
  MOD_RES (20)..(20): Xaa is Aib
  MISC_FEATURE (24)..(24): PEG (40kDa) covalently attached to Cysteine
  MISC_FEATURE (40)..(40): 18 Carbon fatty acyl group covalently attached to Lysine
  MISC_FEATURE (40)..(40): C-terminal amidation

SEQ ID NO: 1139 - protein, 40 aa, Artificial Sequence; identical to SEQ ID NO: 766
  Synthetic polypeptide
  MOD_RES (2)..(2): Xaa is Aib
  MOD_RES (20)..(20): Xaa is Aib
  MISC_FEATURE (24)..(24): PEG (40kDa) covalently attached to Cysteine
  MISC_FEATURE (40)..(40): C-terminal amidation

SEQ ID NO: 1140 - protein, 40 aa, Artificial Sequence; identical to SEQ ID NO: 760
  Synthetic polypeptide
  MOD_RES (2)..(2): Xaa is Aib
  MOD_RES (20)..(20): Xaa is Aib
  MISC_FEATURE (40)..(40): PEG (40kDa) covalently attached to Cysteine
  MISC_FEATURE (40)..(40): C-terminal amidation

SEQ ID NO: 1141 - protein, 40 aa, Artificial Sequence; identical to SEQ ID NO: 759
  Synthetic polypeptide
  MOD_RES (2)..(2): Xaa is Aib
  MOD_RES (20)..(20): Xaa is Aib
  MISC_FEATURE (40)..(40): 16 Carbon fatty acyl group covalently attached to Lysine
  MISC_FEATURE (40)..(40): C-terminal amidation

SEQ ID NO: 1142 - protein, 40 aa, Artificial Sequence
  Synthetic polypeptide
  MOD_RES (2)..(2): Xaa is Aib
  MOD_RES (20)..(20): Xaa is Aib
  MISC_FEATURE (40)..(40): 16 Carbon fatty acyl group covalently attached to Lysine
  MISC_FEATURE (40)..(40): C-terminal amidation
YXQGTFTSDYSIYLDKQAAXEFVCWLMNGGPSSGAPPPSK

SEQ ID NO: 1143 - protein, 40 aa, Artificial Sequence; identical to SEQ ID NO: 1142
  Synthetic polypeptide
  MOD_RES (2)..(2): Xaa is Aib
  MOD_RES (20)..(20): Xaa is Aib
  MISC_FEATURE (24)..(24): PEG (40kDa) covalently attached to Cysteine
  MISC_FEATURE (40)..(40): 16 Carbon fatty acyl group covalently attached to Lysine
  MISC_FEATURE (40)..(40): C-terminal amidation

SEQ ID NO: 1144 - protein, 40 aa, Artificial Sequence; identical to SEQ ID NO: 759
  Synthetic polypeptide
  MOD_RES (2)..(2): Xaa is Aib
  MOD_RES (20)..(20): Xaa is Aib
  MISC_FEATURE (40)..(40): 14 Carbon fatty acyl group covalently attached to Lysine
  MISC_FEATURE (40)..(40): C-terminal amidation

SEQ ID NO: 1145 - protein, 40 aa, Artificial Sequence; identical to SEQ ID NO: 759
  Synthetic polypeptide
  MOD_RES (2)..(2): Xaa is Aib
  MOD_RES (20)..(20): Xaa is Aib
  MISC_FEATURE (40)..(40): 18 Carbon fatty acyl group covalently attached to Lysine
  MISC_FEATURE (40)..(40): C-terminal amidation

SEQ ID NO: 1146 - protein, 40 aa, Artificial Sequence; identical to SEQ ID NO: 759
  Synthetic polypeptide
  MOD_RES (2)..(2): Xaa is Aib
  MOD_RES (20)..(20): Xaa is Aib
  MISC_FEATURE (40)..(40): C-terminal amidation

SEQ ID NO: 1147 - protein, 40 aa, Artificial Sequence; identical to SEQ ID NO: 756
  Synthetic polypeptide
  MOD_RES (2)..(2): Xaa is Aib
  MOD_RES (20)..(20): Xaa is Aib
  MISC_FEATURE (40)..(40): 3-SH-propionic acyl group covalently attached to Lysine
  MISC_FEATURE (40)..(40): C-terminal amidation

SEQ ID NO: 1148 - protein, 40 aa, Artificial Sequence; identical to SEQ ID NO: 1123
  Synthetic polypeptide
  MOD_RES (2)..(2): Xaa is Aib
  MOD_RES (20)..(20): Xaa is Aib
  MISC_FEATURE (40)..(40): 8 Carbon fatty acyl group covalently attached to Lysine
  MISC_FEATURE (40)..(40): C-terminal amidation

SEQ ID NO: 1149 - protein, 40 aa, Artificial Sequence
  Synthetic polypeptide
  MOD_RES (2)..(2): Xaa is Aib
  MOD_RES (20)..(20): Xaa is Aib
  MISC_FEATURE (40)..(40): C-terminal amidation
YXQGTFSSDYSIYLDKQAAXEFVNWLLAGGPSSGAPPPSC

SEQ ID NO: 1150 - protein, 40 aa, Artificial Sequence
  Synthetic polypeptide
  MOD_RES (2)..(2): Xaa is Aib
  MOD_RES (7)..(7): Xaa is 2-aminobutyric acid
  MOD_RES (20)..(20): Xaa is Aib
  MISC_FEATURE (40)..(40): C-terminal amidation
YXQGTFXSDYSIYLDKQAAXEFVNWLLAGGPSSGAPPPSC

SEQ ID NO: 1151 - protein, 40 aa, Artificial Sequence; identical to SEQ ID NO: 766
  Synthetic polypeptide
  MOD_RES (2)..(2): Xaa is Aib
  MOD_RES (20)..(20): Xaa is Aib
  MISC_FEATURE (40)..(40): 8 Carbon fatty acyl group covalently attached to Lysine
  MISC_FEATURE (40)..(40): C-terminal amidation

SEQ ID NO: 1152 - protein, 40 aa, Artificial Sequence; identical to SEQ ID NO: 759
  Synthetic polypeptide
  MOD_RES (2)..(2): Xaa is Aib
  MOD_RES (20)..(20): Xaa is Aib
  MISC_FEATURE (40)..(40): 8 Carbon fatty acyl group covalently attached to Lysine
  MISC_FEATURE (40)..(40): C-terminal amidation

SEQ ID NO: 1153 - protein, 40 aa, Artificial Sequence; identical to SEQ ID NO: 759
  Synthetic polypeptide
  MOD_RES (2)..(2): Xaa is Aib
  MOD_RES (20)..(20): Xaa is Aib
  MISC_FEATURE (24)..(24): PEG (40kDa) covalently attached to Cysteine
  MISC_FEATURE (40)..(40): C-terminal amidation

SEQ ID NO: 1154 - protein, 40 aa, Artificial Sequence
  Synthetic polypeptide
  MOD_RES (2)..(2): Xaa is Aib
  MOD_RES (20)..(20): Xaa is Aib
  MOD_RES (40)..(40): Xaa is d-Lysine
  MISC_FEATURE (40)..(40): 14 Carbon fatty acyl group covalently attached to d-Lysine
  MISC_FEATURE (40)..(40): C-terminal amidation
YXEGTFTSDYSIYLDKQAAXEFVCWLLAGGPSSGAPPPSX

SEQ ID NO: 1155 - protein, 40 aa, Artificial Sequence; identical to SEQ ID NO: 1154
  Synthetic polypeptide
  MOD_RES (2)..(2): Xaa is Aib
  MOD_RES (20)..(20): Xaa is Aib
  MOD_RES (40)..(40): Xaa is d-Lysine
  MISC_FEATURE (40)..(40): C-terminal amidation

SEQ ID NO: 1156 - protein, 40 aa, Artificial Sequence; identical to SEQ ID NO: 1154
  Synthetic polypeptide
  MOD_RES (2)..(2): Xaa is Aib
  MOD_RES (20)..(20): Xaa is Aib
  MISC_FEATURE (24)..(24): PEG (40kDa) covalently attached to Cysteine
  MOD_RES (40)..(40): Xaa is d-Lysine
  MISC_FEATURE (40)..(40): 14 Carbon fatty acyl group covalently attached to Lysine
  MISC_FEATURE (40)..(40): C-terminal amidation

SEQ ID NO: 1157 - protein, 40 aa, Artificial Sequence; identical to SEQ ID NO: 1154
  Synthetic polypeptide
  MOD_RES (2)..(2): Xaa is Aib
  MOD_RES (20)..(20): Xaa is Aib
  MISC_FEATURE (24)..(24): PEG (40kDa) covalently attached to Cysteine
  MISC_FEATURE (40)..(40): Xaa is d-Lysine
  MISC_FEATURE (40)..(40): C-terminal amidation

SEQ ID NO: 1158 - protein, 39 aa, Artificial Sequence
  Synthetic polypeptide
  MOD_RES (2)..(2): Xaa is Aib
  MISC_FEATURE (10)..(10): 14 Carbon fatty acyl group covalently attached to Lysine
  MOD_RES (20)..(20): Xaa is Aib
  MISC_FEATURE (40)..(40): C-terminal amidation
YXEGTFTSDKSIYLDKQAAXEFVCWLLAGGPSSGAPPPS

SEQ ID NO: 1159 - protein, 39 aa, Artificial Sequence; identical to SEQ ID NO: 1158
  Synthetic polypeptide
  MOD_RES (2)..(2): Xaa is Aib
  MOD_RES (20)..(20): Xaa is Aib
  MISC_FEATURE (40)..(40): C-terminal amidation

SEQ ID NO: 1160 - protein, 41 aa, Artificial Sequence
  Synthetic polypeptide
  MOD_RES (2)..(2): Xaa is Aib
  MOD_RES (20)..(20): Xaa is Aib
  MISC_FEATURE (40)..(40): 14 Carbon fatty acyl group covalently attached to Lysine
  MISC_FEATURE (41)..(41): C-terminal amidation
YXEGTFTSDYSIYLDKQAAXEFVNWLLAGGPSSGAPPPSKC

SEQ ID NO: 1161 - protein, 41 aa, Artificial Sequence; identical to SEQ ID NO: 1160
  Synthetic polypeptide
  MOD_RES (2)..(2): Xaa is Aib
  MOD_RES (20)..(20): Xaa is Aib
  MISC_FEATURE (41)..(41): C-terminal amidation

SEQ ID NO: 1162 - protein, 39 aa, Artificial Sequence; identical to SEQ ID NO: 1158
  Synthetic polypeptide
  MOD_RES (2)..(2): Xaa is Aib
  MISC_FEATURE (10)..(10): 14 Carbon fatty acyl group covalently attached to Lysine
  MOD_RES (20)..(20): Xaa is Aib
  MISC_FEATURE (24)..(24): PEG (40kDa) covalently attached to Cysteine
  MISC_FEATURE (39)..(39): C-terminal amidation

SEQ ID NO: 1163 - protein, 41 aa, Artificial Sequence; identical to SEQ ID NO: 1160
  Synthetic polypeptide
  MOD_RES (2)..(2): Xaa is Aib
  MOD_RES (20)..(20): Xaa is Aib
  MISC_FEATURE (40)..(40): 14 Carbon fatty acyl group covalently attached to Lysine
  MISC_FEATURE (41)..(41): PEG (40kDa) covalently attached to Cysteine
  MISC_FEATURE (41)..(41): C-terminal amidation

SEQ ID NO: 1164 - protein, 41 aa, Artificial Sequence; identical to SEQ ID NO: 1160
  Synthetic polypeptide
  MOD_RES (2)..(2): Xaa is Aib
  MOD_RES (20)..(20): Xaa is Aib
  MISC_FEATURE (41)..(41): PEG (40kDa) covalently attached to Cysteine
  MISC_FEATURE (41)..(41): C-terminal amidation

SEQ ID NO: 1165 - protein, 40 aa, Artificial Sequence
  Synthetic polypeptide
  MOD_RES (2)..(2): Xaa is Aib
  MISC_FEATURE (40)..(40): 14 Carbon fatty acyl group covalently attached to Lysine
  MISC_FEATURE (40)..(40): C-terminal amidation
HXQGTFTSDYSKYLDEQAAKEFICWLMNGGPSSGAPPPSK

SEQ ID NO: 1166 - protein, 40 aa, Artificial Sequence; identical to SEQ ID NO: 759
  Synthetic polypeptide
  MOD_RES (2)..(2): Xaa is Aib
  MOD_RES (20)..(20): Xaa is Aib
  MISC_FEATURE (24)..(24): PEG (40kDa) covalently attached to Cysteine
  MISC_FEATURE (40)..(40): 14 Carbon fatty acyl group covalently attached to Lysine
  MISC_FEATURE (40)..(40): C-terminal amidation

SEQ ID NO: 1167 - protein, 40 aa, Artificial Sequence
  Synthetic polypeptide
  MOD_RES (2)..(2): Xaa is Aib
  MOD_RES (16)..(16): Xaa is Aib
  MISC_FEATURE (40)..(40): C-terminal amidation
YXQGTFTSDYSIYLDXQAAKEFVNWLLAGGPSSGAPPPSC

SEQ ID NO: 1168 - protein, 40 aa, Artificial Sequence
  Synthetic polypeptide
  MOD_RES (2)..(2): Xaa is Aib
  MOD_RES (16)..(16): Xaa is Aib
  MISC_FEATURE (40)..(40): C-terminal amidation
YXQGTFTSDYSIYLDXQAAQEFVNWLLAGGPSSGAPPPSC

SEQ ID NO: 1169 - protein, 40 aa, Artificial Sequence
  Synthetic polypeptide
  MOD_RES (2)..(2): Xaa is Aib
  MOD_RES (12)..(16): Lactam bridge between residues 12 and 16
  MOD_RES (20)..(20): Xaa is Aib
  MOD_RES (40)..(40): C-terminal amidation
YXQGTFTSDYSKYLDEQAAXEFVNWLLAGGPSSGAPPPSC

SEQ ID NO: 1170 - protein, 10 aa, Artificial Sequence
  Synthetic polypeptide
GPSSGAPPPK

SEQ ID NO: 1171 - protein, 11 aa, Artificial Sequence
  Synthetic polypeptide
  MOD_RES (1)..(1): Xaa is Gly or a small, aliphatic or non-polar or slightly polar amino acid
XGPSSGAPPPK

SEQ ID NO: 1172 - protein, 12 aa, Artificial Sequence
  Synthetic  polypeptide
  MOD_RES (1)..(1): Xaa is Gly or a small, aliphatic or non-polar or slightly polar amino acid
XGPSSGAPPPSK

SEQ ID NO: 1173 - protein, 40 aa, Artificial Sequence; identical to SEQ ID NO: 1167
  Synethic polypeptide
  MOD_RES (2)..(2): Xaa is Aib
  MOD_RES (16)..(16): Xaa is Aib
  MISC_FEATURE (40)..(40): PEG (40kDa) covalently attached to Cysteine
  MISC_FEATURE (40)..(40): C-terminal amidation

SEQ ID NO: 1174 - protein, 40 aa, Artificial Sequence; identical to SEQ ID NO: 1168
  Synthetic polypeptide
  MOD_RES (2)..(2): Xaa is Aib
  MOD_RES (16)..(16): Xaa is Aib
  MISC_FEATURE (40)..(40): PEG (40kDa) covalently attached to Cysteine
  MISC_FEATURE (40)..(40): C-terminal amidation

SEQ ID NO: 1175 - protein, 40 aa, Artificial Sequence; identical to SEQ ID NO: 1121
  Synthetic polypeptide
  MOD_RES (2)..(2): Xaa is Aib
  MOD_RES (16)..(16): Xaa is Aib
  MOD_RES (20)..(20): Xaa is Aib
  MISC_FEATURE (40)..(40): C-terminal amidation

SEQ ID NO: 1176 - protein, 40 aa, Artificial Sequence
  Synthetic polypeptide
  MOD_RES (2)..(2): Xaa is Aib
  MOD_RES (20)..(20): Xaa is Aib
  MISC_FEATURE (40)..(40): C-terminal amidation
YXQGTFTSDYSIYLDEQAAXEFVNWLLAGGPSSGAPPPSC

SEQ ID NO: 1177 - protein, 29 aa, Artificial Sequence
  Synthetic polypeptide
  MOD_RES (2)..(2): Xaa is Aib
  MOD_RES (20)..(20): Xaa is Aib
  MISC_FEATURE (29)..(29): C-terminal amidation
YXQGTFTSDYSIYLDEQAAXEFVCWLLAG

SEQ ID NO: 1178 - protein, 29 aa, Artificial Sequence
  Synthetic polypeptide
  MISC_FEATURE: C-terminal amidation
  MOD_RES (2)..(2): Xaa is Aib
  MOD_RES (20)..(20): Xaa is Aib
YXQGTFTSDYSIYLDSQAAXEFVCWLLAG

SEQ ID NO: 1179 - protein, 30 aa, Artificial Sequene
  Synthetic polypeptide
  MOD_RES (2)..(2): Xaa is Aib
  MISC_FEATURE (24)..(24): PEG (40kDa) covalently attached to Cysteine
HXEGTFTSDVSSYLEEQAAKEFICWLVKGR

SEQ ID NO: 1180 - protein, 42 aa, Artificial Sequence
  Synthetic polypeptide
  MISC_FEATURE (24)..(24): Substituted amino acid covalently linked to hydrophilic group
YAPGTFISDYSIAMDKIHQQDFVXWLLAQKGKKNWLKHNITQ

SEQ ID NO: 1181 - protein, 40 aa, Artificial Sequence
  Synthetic polypeptide
  MOD_RES (2)..(2): Xaa is Aib
  MISC_FEATURE (16)..(20): Lactam bridge between residues 16 and 20
  MISC_FEATURE (40)..(40): Substituted amino acid covalentaly linked to hydrophilic group
YXQGTFTSDYSIYLDEQAAKEFVNWLLAGGPSSGAPPPSX

SEQ ID NO: 1182 - protein, 29 aa, Artificial Sequence
  Synthetic polypeptide
  MOD_RES (2)..(2): Xaa is Aib
  MISC_FEATURE (16)..(20): Lactam bridge between residues 16 and 20
  MISC_FEATURE (24)..(24): Substituted amino acid covalently linked to hydrophilic group
  misc_feature (29)..(29): Xaa can be any naturally occurring amino acid
YXQGTFTSDYSIYLDEQAAKEFVXWLLAX

SEQ ID NO: 1183 - protein, 39 aa, Artificial Sequence
  Synthetic polypeptide
  MOD_RES (2)..(2): Xaa is Aib
  MISC_FEATURE (16)..(20): Lactam bridge between residues 16 and 20
  MISC_FEATURE (24)..(24): Substituted amino acid covalently linked to hydrophilic group
YXQGTFTSDYSIYLDEQAAKEFVXWLLAGGPSSGAPPPS

SEQ ID NO: 1184 - protein, 40 aa, Artificial Sequence
  Synthetic polypeptide
  MOD_RES (2)..(2): Xaa is Aib
  MISC_FEATURE (16)..(20): Lactam bridge between residues 16 and 20
  MISC_FEATURE (40)..(40): Substituted amino acid covalently linked to hydrophilic group
YXEGTFTSDYSIYLDEQAAKEFVNWLLAGGPSSGAPPPSX

SEQ ID NO: 1185 - protein, 29 aa, Artificial Sequence
  Sythetic polypeptide
  MOD_RES (2)..(2): Xaa is Aib
  MISC_FEATURE (16)..(20): Lactam bridge between residues 16 and 20
  MISC_FEATURE (24)..(24): Substituted amino acid covalently linked to hydrophilic group
YXQGTFISDYSIYLDEQAAKEFVXWLLAG

SEQ ID NO: 1186 - protein, 40 aa, Artificial Sequence
  Synthetic polypeptide
  MOD_RES (2)..(2): Xaa is Aib
  MISC_FEATURE (16)..(20): Lactam bridge between residues 16 and 20
  MISC_FEATURE (40)..(40): Substituted amino acid covalently linked to hydrophilic group
YXQGTFISDYSIYLDEQAAKEFVNWLLAGGPSSGAPPPSX

SEQ ID NO: 1187 - protein, 29 aa, Artificial sequence
  Synthetic polypeptide
  MOD_RES (2)..(2): Xaa is Aib
  MISC_FEATURE (16)..(20): Lactam bridge between residues 16 and 20
  MISC_FEATURE (24)..(24): Substituted amino acid covalently linked to hydrophilic group
YXQGTFTSDYSIYLDEQAAKEFVXWLMNG

SEQ ID NO: 1188 - protein, 40 aa, Artificial sequence
  Synthetic polypeptide
  MOD_RES (2)..(2): Xaa is Aib
  MISC_FEATURE (16)..(20): Lactam bridge between residues 16 and 20
  MISC_FEATURE (40)..(40): Substitute amino acid covalently linked to hydrophilic group
YXQGTFVSDYSIYLDEQAAKEFVNWLLAGGPSSGAPPPSX

SEQ ID NO: 1189 - protein, 40 aa, Artificial sequence
  Synthetic polypeptide
  MOD_RES (2)..(2): Xaa is Aib
  MISC_FEATURE (16)..(20): Lactam bridge between residues 16 and 20
  MOD_RES (27)..(27): Xaa is Nle
  MISC_FEATURE (40)..(40): Substituted amino acid covalently linked to hydrophilic group
YXQGTFTSDYSIYLDEQAAKEFVNWLXAGGPSSGAPPPSX

SEQ ID NO: 1190 - protein, 40 aa, Artificial sequence
  Synthetic polypeptide
  MOD_RES (2)..(2): Xaa is Aib
  MISC_FEATURE (16)..(20): Lactam bridge between residues 16 and 20
  MISC_FEATURE (40)..(40): Substituted amino acid covalently linked to hydrophilic group
YXEGTFTSDYSIYLDEQAAKEFVNWLLAGRPSSGAPPPSX

SEQ ID NO: 1191 - protein, 43 aa, Artificial sequence
  Synthetic polypeptide
  MOD_RES (2)..(2): Xaa is Aib
  MISC_FEATURE (16)..(20): Lactam bridge between residues 16 and 20
  MISC_FEATURE (43)..(43): Substituted amino acid covalently linked to hydrophilic group
YXEGTFTSDYSIYLDEQAAKEFVNWLLAGKGKKNWLKHNITQX

SEQ ID NO: 1192 - protein, 40 aa, Artificial Sequence
  Synthetic polypeptide
  MOD_RES (2)..(2): Xaa is Aib
  MOD_RES (20)..(20): Xaa is Aib
  MISC_FEATURE (40)..(40): Substituted amino acid covalently linked to hydrophilic group
  MISC_FEATURE (40)..(40): C-terminal amidation
YXEGTFTSDYSIYLDKQAAXEFVNWLLAGGPSSGAPPPSX

SEQ ID NO: 1193 - protein, 40 aa, Artificial Sequence
  Synthetic polypeptide
  MOD_RES (2)..(2): Xaa is Aib
  MOD_RES (20)..(20): Xaa is Aib
  MISC_FEATURE (24)..(24): Substituted amino acid covalently linked to hydrophilic group
  MISC_FEATURE (40)..(40): C-terminal amidation
YXEGTFTSDYSIYLDKQAAXEFVXWLLAGGPSSGAPPPSK

SEQ ID NO: 1194 - protein, 40 aa, Artificial Sequence
  Synthetic polypeptide
  MOD_RES (2)..(2): Xaa is Aib
  MOD_RES (20)..(20): Xaa is Aib
  MISC_FEATURE (24)..(24): Substituted amino acid covalently linked to hydrophilic group
  MISC_FEATURE (40)..(40): Substitute amino acid covalently linked to an acyl or alkyl group
  MISC_FEATURE (40)..(40): C-terminal amidation
YXEGTFTSDYSIYLDKQAAXEFVXWLLAGGPSSGAPPPSX

SEQ ID NO: 1195 - protein, 40 aa, Artificial Sequence; identical to SEQ ID NO: 1192
  Synthetic polypeptide
  MOD_RES (2)..(2): Xaa is Aib
  MOD_RES (20)..(20): Xaa is Aib
  MISC_FEATURE (40)..(40): Substituted amino acid covalently linked to an acyl or alkyl group
  MISC_FEATURE (40)..(40): C-terminal amidation

SEQ ID NO: 1196 - protein, 40 aa, Artificial Sequence
  Synthetic polypeptide
  MOD_RES (2)..(2): Xaa is Aib
  MOD_RES (20)..(20): Xaa is Aib
  MISC_FEATURE (40)..(40): Substituted amino acid covalently linked to hydrophilic group
  MISC_FEATURE (40)..(40): C-terminal amidation
YXQGTFTSDYSIYLDKQAAXEFVNWLLAGGPSSGAPPPSX

SEQ ID NO: 1197 - protein, 39 aa, Artificial Sequence
  Synthetic polypeptide
  MOD_RES (2)..(2): Xaa is Aib
  MOD_RES (20)..(20): Xaa is Aib
  MISC_FEATURE (24)..(24): Substituted amino acid covalently linked to acyl or alkyl group
  MISC_FEATURE (39)..(39): C-terminal amidation
YXEGTFTSDYSIYLDKQAAXEFVXWLLAGGPSSGAPPPS

SEQ ID NO: 1198 - protein, 39 aa, Artificial Sequence
  Synthetic polypeptide
  MOD_RES (2)..(2): Xaa is Aib
  MISC_FEATURE (10)..(10): Substituted amino acid covalently linked to acyl or alkyl group
  MOD_RES (20)..(20): Xaa is Aib
  MISC_FEATURE (39)..(39): C-terminal amidation
YXEGTFTSDXSIYLDKQAAXEFVNWLLAGGPSSGAPPPS

SEQ ID NO: 1199 - protein, 40 aa, Artificial Sequence; identical to SEQ ID NO: 1196
  Synthetic polypeptide
  MOD_RES (2)..(2): Xaa is Aib
  MOD_RES (20)..(20): Xaa is Aib
  MISC_FEATURE (40)..(40): Substituted amino acid covalently linked to acyl or alkyl group
  MISC_FEATURE (40)..(40): C-terminal amidation

SEQ ID NO: 1200 - protein, 29 aa, Artificial Sequence
  Synthetic polypeptide
  MOD_RES (2)..(2): Xaa is Aib
  MOD_RES (20)..(20): Xaa is Aib
  MISC_FEATURE (24)..(24): Substituted amino acid covalently linked to hydrophilic group
  MISC_FEATURE (29)..(29): C-terminal amidation
YXQGTFTSDYSIYLDKQAAXEFVXWLLAG

SEQ ID NO: 1201 - protein, 29 aa, Artificial Sequence
  Synthetic polypeptide
  MOD_RES (2)..(2): Xaa is Aib
  MISC_FEATURE (10)..(10): Substituted amino acid covalently linked to acyl or alkyl group
  MOD_RES (20)..(20): Xaa is Aib
  MISC_FEATURE (29)..(29): C-terminal amidation
YXEGTFTSDXSIYLDKQAAXEFVNWLLAG

SEQ ID NO: 1202 - protein, 40 aa, Artificial Sequence
  Synthetic polypeptide
  MOD_RES (2)..(2): Xaa is Aib
  MOD_RES (20)..(20): Xaa is Aib
  MISC_FEATURE (40)..(40): Substituted amino acid covalently linked acyl or alkyl group
  MISC_FEATURE (40)..(40): C-terminal amidation
YXQGTFTSDYSIYLDKQAAXEFVCWLLAGGPSSGAPPPSX

SEQ ID NO: 1203 - protein, 40 aa, Artificial Sequence
  Synthetic polypeptide
  MOD_RES (2)..(2): Xaa is Aib
  MOD_RES (20)..(20): Xaa is Aib
  MISC_FEATURE (24)..(24): Substituted amino acid covalently linked to hydrophilic group
  MISC_FEATURE (40)..(40): Substituted amino acid covalently linked to acyl or alkyl group
  MISC_FEATURE (40)..(40): C-terminal amidation
YXQGTFTSDYSIYLDKQAAXEFVXWLLAGGPSSGAPPPSX

SEQ ID NO: 1204 - protein, 40 aa, Artificial Sequence
  Synthetic polypeptide
  MOD_RES (2)..(2): Xaa is Aib
  MOD_RES (20)..(20): Xaa is Aib
  MISC_FEATURE (24)..(24): Substituted amino acid covalently linked to hydrophilic group
  MISC_FEATURE (40)..(40): C-terminal amidation
YXQGTFTSDYSIYLDKQAAXEFVXWLLAGGPSSGAPPPSK

SEQ ID NO: 1205 - protein, 40 aa, Artificial Sequence; identical to SEQ ID NO: 1192
  Synthetic polypeptide
  MOD_RES (2)..(2): Xaa is Aib
  MOD_RES (20)..(20): Xaa is Aib
  MISC_FEATURE (40)..(40): Substituted amino acid covalently linked to hydrophilic group
  MISC_FEATURE (40)..(40): C-terminal amidation

SEQ ID NO: 1206 - protein, 40 aa, Artificial Sequence; identical to SEQ ID NO: 1154
  Synthetic polypeptide
  MOD_RES (2)..(2): Xaa is Aib
  MOD_RES (20)..(20): Xaa is Aib
  MISC_FEATURE (40)..(40): Substituted amino acid covalently linked to acyl or alkyl group
  MISC_FEATURE (40)..(40): C-terminal amidation

SEQ ID NO: 1207 - protein, 40 aa, Artificial Sequence
  Synthetic polypeptide
  MOD_RES (2)..(2): Xaa is Aib
  MOD_RES (20)..(20): Xaa is Aib
  MISC_FEATURE (40)..(40): Substituted amino acid covalently linked to acyl or alkyl group
  MISC_FEATURE (40)..(40): C-terminal amidation
YXQGTFTSDYSIYLDKQAAXEFVCWLMNGGPSSGAPPPSX

SEQ ID NO: 1208 - protein, 40 aa, Artificial Sequence
  Synthetic polypeptide
  MOD_RES (2)..(2): Xaa is Aib
  MOD_RES (20)..(20): Xaa is Aib
  MISC_FEATURE (24)..(24): Substituted amino acid covalently linked to hydrophilic group
  MISC_FEATURE (40)..(40): Substituted amino acid covalently linked to acyl or alkyl group
  MISC_FEATURE (40)..(40): C-terminal amidation
YXQGTFTSDYSIYLDKQAAXEFVXWLMNGGPSSGAPPPSX

SEQ ID NO: 1209 - protein, 40 aa, Artificial Sequence; identical to SEQ ID NO: 1154
  Synthetic polypeptide
  MOD_RES (2)..(2): Xaa is Aib
  MOD_RES (20)..(20): Xaa is Aib
  MISC_FEATURE (40)..(40): Substituted amino acid covalently linked to acyl or alkyl group
  MISC_FEATURE (40)..(40): C-terminal amidation

SEQ ID NO: 1210 - protein, 40 aa, Artificial Sequence; identical to SEQ ID NO: 1196
  Synthetic polypeptide
  MOD_RES (2)..(2): Xaa is Aib
  MOD_RES (20)..(20): Xaa is Aib
  MISC_FEATURE (40)..(40): Substituted amino acid covalently linked to acyl or alkyl group
  MISC_FEATURE (40)..(40): C-terminal amidation

SEQ ID NO: 1211 - protein, 40 aa, Artificial Sequence; identical to SEQ ID NO: 1202
  Synthetic polypeptide
  MOD_RES (2)..(2): Xaa is Aib
  MOD_RES (20)..(20): Xaa is Aib
  MISC_FEATURE (40)..(40): Substituted amino acid covalently linked to acyl or alkyl group
  MISC_FEATURE (40)..(40): C-terminal amidation

SEQ ID NO: 1212 - protein, 40 aa, Artificial Sequence; identical to SEQ ID NO: 1154
  Synthetic polypeptide
  MOD_RES (2)..(2): Xaa is Aib
  MOD_RES (20)..(20): Xaa is Aib
  MISC_FEATURE (40)..(40): Substituted amino acid covalently linked to acyl or alkyl group
  MISC_FEATURE (40)..(40): C-terminal amidation

SEQ ID NO: 1213 - protein, 40 aa, Artificial Sequence; identical to SEQ ID NO: 1193
  Synthetic polypeptide
  MOD_RES (2)..(2): Xaa is Aib
  MOD_RES (20)..(20): Xaa is Aib
  MISC_FEATURE (24)..(24): Substituted amino acid covalently linked to hydrophilic group
  MISC_FEATURE (40)..(40): C-terminal amidation

SEQ ID NO: 1214 - protein, 40 aa, Artificial Sequence; identical to SEQ ID NO: 1154
  Synthetic polypeptide
  MOD_RES (2)..(2): Xaa is Aib
  MOD_RES (20)..(20): Xaa is Aib
  MISC_FEATURE (40)..(40): Substituted amino acid covalently linked to acyl or alkyl group
  MISC_FEATURE (40)..(40): C-terminal amidation

SEQ ID NO: 1215 - protein, 40 aa, Artificial Sequence; identical to SEQ ID NO: 1194
  Synthetic polypeptide
  MOD_RES (2)..(2): Xaa is Aib
  MOD_RES (20)..(20): Xaa is Aib
  MISC_FEATURE (24)..(24): Substituted amino acid covalently linked to hydrophilic group
  MISC_FEATURE (40)..(40): Substituted amino acid covalently linked to acyl or alkyl group
  MISC_FEATURE (40)..(40): C-terminal amidation

SEQ ID NO: 1216 - protein, 40 aa, Artificial Sequence; identical to SEQ ID NO: 1194
  Synthetic polypeptide
  MOD_RES (2)..(2): Xaa is Aib
  MOD_RES (20)..(20): Xaa is Aib
  MISC_FEATURE (24)..(24): Substituted amino acid covalently linked to hydrophilic group
  MISC_FEATURE (40)..(40): C-terminal amidation

SEQ ID NO: 1217 - protein, 39 aa, Artificial Sequence
  Synthetic polypeptide
  MOD_RES (2)..(2): Xaa is Aib
  MISC_FEATURE (10)..(10): Substituted amino acid covalently linked to acyl or alkyl group
  MOD_RES (20)..(20): Xaa is Aib
  MISC_FEATURE (40)..(40): C-terminal amidation
YXEGTFTSDXSIYLDKQAAXEFVCWLLAGGPSSGAPPPS

SEQ ID NO: 1218 - protein, 41 aa, Artificial Sequence
  Synthetic polypeptide
  MOD_RES (2)..(2): Xaa is Aib
  MOD_RES (20)..(20): Xaa is Aib
  MISC_FEATURE (40)..(40): Substituted amino acid covalently linked to acyl or alkyl group
  MISC_FEATURE (41)..(41): C-terminal amidation
YXEGTFTSDYSIYLDKQAAXEFVNWLLAGGPSSGAPPPSXC

SEQ ID NO: 1219 - protein, 39 aa, Artificial Sequence
  Synthetic polypeptide
  MOD_RES (2)..(2): Xaa is Aib
  MISC_FEATURE (10)..(10): Substituted amino acid covalently linked to acyl or alkyl group
  MOD_RES (20)..(20): Xaa is Aib
  MISC_FEATURE (24)..(24): Substituted amino acid covalently linked to hydrophilic group
  MISC_FEATURE (39)..(39): C-terminal amidation
YXEGTFTSDXSIYLDKQAAXEFVXWLLAGGPSSGAPPPS

SEQ ID NO: 1220 - protein, 41 aa, Artificial Sequence
  Synthetic polypeptide
  MOD_RES (2)..(2): Xaa is Aib
  MOD_RES (20)..(20): Xaa is Aib
  MISC_FEATURE (40)..(40): Substituted amino acid covalently linked to acyl or alkyl group
  MISC_FEATURE (41)..(41): Substituted amino acid covalently linked to hydrophilic group
  MISC_FEATURE (41)..(41): C-terminal amidation
YXEGTFTSDYSIYLDKQAAXEFVNWLLAGGPSSGAPPPSXX

SEQ ID NO: 1221 - protein, 41 aa, Artificial Sequence
  Synthetic polypeptide
  MOD_RES (2)..(2): Xaa is Aib
  MOD_RES (20)..(20): Xaa is Aib
  MISC_FEATURE (41)..(41): Substituted amino acid covalently linked to hydrophilic group
  MISC_FEATURE (41)..(41): C-terminal amidation
YXEGTFTSDYSIYLDKQAAXEFVNWLLAGGPSSGAPPPSKX

SEQ ID NO: 1222 - protein, 40 aa, Artificial Sequence
  Synthetic polypeptide
  MOD_RES (2)..(2): Xaa is Aib
  MISC_FEATURE (40)..(40): Substituted amino acid covalently linked to acyl or alkyl group
  MISC_FEATURE (40)..(40): C-terminal amidation
HXQGTFTSDYSKYLDEQAAKEFICWLMNGGPSSGAPPPSX

SEQ ID NO: 1223 - protein, 40 aa, Artificial Sequence; identical to SEQ ID NO: 1194
  Synthetic polypeptide
  MOD_RES (2)..(2): Xaa is Aib
  MOD_RES (20)..(20): Xaa is Aib
  MISC_FEATURE (24)..(24): Substituted amino acid covalently linked to hydrophilic group
  MISC_FEATURE (40)..(40): Substituted amino acid covalently linked to acyl or alkyl group
  MISC_FEATURE (40)..(40): C-terminal amidation

SEQ ID NO: 1224 - protein, 40 aa, Artificial Sequence
  Synethic polypeptide
  MOD_RES (2)..(2): Xaa is Aib
  MOD_RES (16)..(16): Xaa is Aib
  MISC_FEATURE (40)..(40): Substituted amino acid covalently linked to hydrophilic group
  MISC_FEATURE (40)..(40): C-terminal amidation
YXQGTFTSDYSIYLDXQAAKEFVNWLLAGGPSSGAPPPSX

SEQ ID NO: 1225 - protein, 40 aa, Artificial Sequence
  Synthetic polypeptide
  MOD_RES (2)..(2): Xaa is Aib
  MOD_RES (16)..(16): Xaa is Aib
  MISC_FEATURE (40)..(40): Substituted amino acid covalently linked to hydrophilic group
  MISC_FEATURE (40)..(40): C-terminal amidation
YXQGTFTSDYSIYLDXQAAQEFVNWLLAGGPSSGAPPPSX

SEQ ID NO: 1226 - protein, 30 aa, Artificial Sequene; identical to SEQ ID NO: 1179
  Synthetic polypeptide
  MOD_RES (2)..(2): Xaa is Aib
  MISC_FEATURE (24)..(24): Substituted amino acid covalently linked to hydrophilic group

SEQ ID NO: 1227 - protein, 29 aa, Artificial Sequence
  Synthetic polypeptide
  MOD_RES (2)..(2): Xaa is Aib
  MOD_RES (20)..(20): Xaa is Aib
  MISC_FEATURE (29)..(29): C-terminal amidation
YXQGTFTSDYSIYLDKQAAXEFVNWLLAG

SEQ ID NO: 1228 - protein, 29 aa, Artificial Sequence
  Synthetic polypeptide
  MOD_RES (2)..(2): Xaa is D-Ser, D-Ala, Val, Gly, N-Methyl Ser, N-Methyl Ala, or Aib
  MOD_RES (16)..(16): Xaa is Lys, Glu, Ser, Orn, Dab, Aib or any alpha, alpha-disubstituted amino acid
  MOD_RES (20)..(20): Xaa is any alpha, alpha-disubstituted amino acid
  MOD_RES (27)..(27): Xaa is Ile, Leu, or Nle
  MOD_RES (28)..(28): Xaa is Ala or Gly
  MOD_RES (29)..(29): Xaa is Thr, Ala, or Gly
  MISC_FEATURE (29)..(29): C-terminal amidation
YXQGTFTSDYSIYLDXQAAXEFVNWLXXX

SEQ ID NO: 1229 - protein, 29 aa, Artificial Sequence
  Synthetic polypeptide
  MOD_RES (2)..(2): Xaa is Aib
  MOD_RES (20)..(20): Xaa is Aib
  MISC_FEATURE (29)..(29): C-terminal amidation
YXQGTFTSDYSKYLDKRRAXDFVQWLLAG

SEQ ID NO: 1230 - protein, 29 aa, Artificial Sequence
  Synthetic polypeptide
  MOD_RES (2)..(2): Xaa is D-Ser, DAla, Val, Gly, N-Methyl Ser, N-Methyl Ala, or Aib
  MOD_RES (16)..(16): Xaa is Lys, Glu, Ser, Orn, Dab, Aib or any alpha, alpha-disubstituted amino acid
  MOD_RES (20)..(20): Xaa is any alpha, alpha-disubstituted amino acid
  MOD_RES (27)..(27): Xaa is Ile, Leu, or Nle
  MOD_RES (28)..(28): Xaa is Ala or Gly
  MOD_RES (29)..(29): Xaa is Thr, Ala, or Gly
  MOD_RES (29)..(29): C-terminal amidation
YXQGTFTSDYSKYLDXRRAXDFVQWLXXX

SEQ ID NO: 1231 - protein, 41 aa, Artificial Sequence; identical to SEQ ID NO: 1160
  Synthetic polypeptide
  MISC_FEATURE: Homodimer
  MOD_RES (2)..(2): Xaa is Aib
  MOD_RES (20)..(20): Xaa is Aib
  MISC_FEATURE (40)..(40): 14 Carbon fatty acyl group covalently bound to Lysine
  MOD_RES (40)..(40): C-terminal amidation
  DISULFID (41)..(41): Disulfide bond formed with Cys residue of a second peptide having the same structure.

SEQ ID NO: 1232 - protein, 40 aa, Artificial Sequence
  Synthetic polypeptide
  MOD_RES (2)..(2): Xaa is Aib
  MOD_RES (20)..(20): Xaa is Aib
  MISC_FEATURE (40)..(40): C-terminal amidation
YXQGTFTSDYSIYLDKQAAXEFVNWLMNGGPSSGAPPPSK

SEQ ID NO: 1233 - protein, 40 aa, Artificial Sequence
  Synthetic polypeptide
  MOD_RES (2)..(2): Xaa is Aib
  MOD_RES (20)..(20): Xaa is Aib
  MISC_FEATURE (40)..(40): C-terminal amidation
YXQGTFISDYSIYLDKQAAXEFVNWLLAGGPSSGAPPPSK

SEQ ID NO: 1234 - protein, 40 aa, Artificial Sequence; identical to SEQ ID NO: 1233
  Synthetic polypeptide
  MOD_RES (2)..(2): Xaa is Aib
  MOD_RES (20)..(20): Xaa is Aib
  MISC_FEATURE (40)..(40): 16 Carbon fatty acyl group covalently bound to Lysine
  MISC_FEATURE (40)..(40): C-terminal amidation

SEQ ID NO: 1235 - protein, 40 aa, Artificial Sequence; identical to SEQ ID NO: 756
  Synthetic polypeptide
  MOD_RES (2)..(2): Xaa is Aib
  MOD_RES (20)..(20): Xaa is Aib
  MISC_FEATURE (40)..(40): 16 Carbon fatty acyl group covalently bound to Lysine via a dipeptide spacer
  MISC_FEATURE (40)..(40): C-terminal amidation

SEQ ID NO: 1236 - protein, 40 aa, Artificial Sequence; identical to SEQ ID NO: 1123
  Synthetic polypeptide
  MOD_RES (2)..(2): Xaa is Aib
  MOD_RES (20)..(20): Xaa is Aib
  MISC_FEATURE (40)..(40): 16 Carbon fatty acyl group covalently bound to Lysine via a dipeptide spacer
  MISC_FEATURE (40)..(40): C-terminal amidation

SEQ ID NO: 1237 - protein, 40 aa, Artificial Sequence; identical to SEQ ID NO: 765
  Synthetic polypeptide
  MOD_RES (2)..(2): Xaa is Aib
  MISC_FEATURE (10)..(10): 16 Carbon fatty acyl group covalently bound to Lysine via dipeptide spacer
  MOD_RES (20)..(20): Xaa is Aib
  MISC_FEATURE (40)..(40): C-terminal amidation

SEQ ID NO: 1238 - protein, 41 aa, Artificial Sequence; identical to SEQ ID NO: 1160
  Synthetic polypeptide
  MISC_FEATURE: Homodimer
  MOD_RES (2)..(2): Xaa is Aib
  MOD_RES (20)..(20): Xaa is Aib
  MISC_FEATURE (40)..(40): 14 Carbon fatty acyl group covelently bound to Lysine
  MISC_FEATURE (41)..(41): C-terminal amidation
  MISC_FEATURE (41)..(41): Cys residue covalently attached to 20 kDa PEG which is in turn covalently attached to a Cys residue of a second peptide having the same structure

SEQ ID NO: 1239 - protein, 41 aa, Artificial Sequence; identical to SEQ ID NO: 1160
  Synthetic polypeptide
  MISC_FEATURE: homodimer
  MOD_RES (2)..(2): Xaa is Aib
  MOD_RES (20)..(20): Xaa is Aib
  MISC_FEATURE (40)..(40): 14 Carbon fatty acyl group covalently bound to Lysine
  MISC_FEATURE (41)..(41): PEG (5kDa) covalently bound to Cysteine
  MISC_FEATURE (41)..(41): C-terminal amidation
  MISC_FEATURE (41)..(41): Cys residue covalently attached to 5 kDa PEG which is in turn covalently attached to a Cys residue of a second peptide having the same structure

SEQ ID NO: 1240 - protein, 29 aa, Artificial Sequence
  Synthetic polypeptide
  MOD_RES (3)..(3): Xaa is a Glutamine analog
  MOD_RES (27)..(27): Xaa is Nle
HSXGTFTSDYSKYLDTRRAAEFVAWLXDE

SEQ ID NO: 1241 - protein, 29 aa, Artificial Sequence
  Synthetic polypeptide
  MOD_RES (3)..(3): Xaa is a Glutamine analog
  MOD_RES (16)..(16): Xaa is Aib
HSXGTFTSDYSKYLDXRRAADFVAWLMDE

SEQ ID NO: 1242 - protein, 29 aa, Artificial Sequence
  Synthetic polypeptide
  MOD_RES (27)..(27): Xaa is Nle
HSQGTFTSDYSKYLDTRRAAEFVAWLXDE

SEQ ID NO: 1243 - protein, 29 aa, Artificial Sequence
  Synthetic peptide
  MOD_RES (3)..(3): Xaa is Acetamidomethyl-cysteine
  MOD_RES (27)..(27): Xaa is Nle
HSXGTFTSDYSKYLDTRRAAEFVAWLXDE

SEQ ID NO: 1244 - protein, 29 aa, Artificial Sequence
  Synthetic peptide
  MOD_RES (3)..(3): Xaa is Acetyldiaminobutanoic acid
  MOD_RES (27)..(27): Xaa is Nle
HSXGTFTSDYSKYLDTRRAAEFVAWLXDE

SEQ ID NO: 1245 - protein, 29 aa, Artificial Sequence
  Synthetic polypeptide
  MOD_RES (3)..(3): Xaa is carbamoyldiaminopropanoic acid
  MOD_RES (27)..(27): Xaa is Nle
HSXGTFTSDYSKYLDTRRAAEFVAWLXDE

SEQ ID NO: 1246 - protein, 29 aa, Artificial Sequence
  Synthetic polypeptide
  MOD_RES (3)..(3): Xaa is Methylglutamine
  MOD_RES (27)..(27): Xaa is Nle
HSXGTFTSDYSKYLDTRRAAEFVAWLXDE

SEQ ID NO: 1247 - protein, 29 aa, Artificial Sequence
  Synthetic peptide
  MOD_RES (3)..(3): Xaa is Methionine sulfoxide
  MOD_RES (27)..(27): Xaa is Nle
HSXGTFTSDYSKYLDTRRAAEFVAWLXDE

SEQ ID NO: 1248 - protein, 29 aa, Artificial Sequence
  Synthetic peptide
  MOD_RES (3)..(3): Xaa is Acetylornithine
  MOD_RES (27)..(27): Xaa is Nle
HSXGTFTSDYSKYLDTRRAAEFVAWLXDE

SEQ ID NO: 1249 - protein, 29 aa, Artificial Sequence
  Synthetic polypeptide
  MOD_RES (16)..(16): Xaa is Aib
HSQGTFTSDYSKYLDXRRAADFVAWLMDE

SEQ ID NO: 1250 - protein, 29 aa, Artificial Sequence
  Synthetic polypeptide
  MOD_RES (3)..(3): Xaa is Acetyldiaminobutanoic acid
  MOD_RES (16)..(16): Xaa is Aib
HSXGTFTSDYSKYLDXRRAADFVAWLMDE

SEQ ID NO: 1251 - protein, 29 aa, Artificial Sequence
  Synthetic polypeptide
  MOD_RES (3)..(3): Xaa is Methylglutamine
  MOD_RES (16)..(16): Xaa is Aib
HSXGTFTSDYSKYLDXRRAADFVAWLMDE

SEQ ID NO: 1252 - protein, 29 aa, Artificial Sequence
  Synthetic polypeptide
HSQGTFTSDYSKYLDSRRAQDFVQWLMDT

SEQ ID NO: 1253 - protein, 29 aa, Artificial Sequence
  Synthetic polypeptide
  MOD_RES (3)..(3): Xaa is Acetyldiaminobutanoic acid
  MOD_RES (16)..(16): Xaa is Aib
HSXGTFTSDYSKYLDXRRAADFVAWLLDE

SEQ ID NO: 1254 - protein, 39 aa, Artificial Sequence; identical to SEQ ID NO: 604
  Synthetic polypeptide
  MOD_RES (3)..(3): Xaa is Acetyldiaminobutanoic acid
  MOD_RES (16)..(16): Xaa is Aib
  MISC_FEATURE (39)..(39): C-terminal amidation

SEQ ID NO: 1255 - protein, 29 aa, Artificial Sequence
  Synthetic polypeptide
  MOD_RES (3)..(3): Xaa is Acetyldiaminobutanoic acid
  MOD_RES (16)..(16): Xaa is Aib
HSXGTFTSDYSKYLDXRRASDFVSWLLDE

SEQ ID NO: 1256 - protein, 29 aa, Artificial Sequence
  Synthetic polypeptide
  MOD_RES (3)..(3): Xaa is Acetyldiaminobutanoic acid
  MOD_RES (16)..(16): Xaa is Aib
HSXGTFTSDYSKYLDXRRATDFVTWLLDE

SEQ ID NO: 1257-1258 - skipped (2 entries)

SEQ ID NO: 1259 - protein, 40 aa, Artificial Sequence
  Synthetic peptide
  MOD_RES (2)..(2): Xaa is Aib
  MISC_FEATURE (16)..(20): Lactam bridge links Glu16 and Lys20
  MOD_RES (40)..(40): Epsilon amine of Lys is attached to Ala-Ac-Cys(PEG), wherein the Ac-Cys(PEG) is a Cys residue comprising an alpha amino group capped with an acetyl group (CH3CO) and comprising a 40 kDa PEG covalently attached to its side chain
YXQGTFTSDYSIYLDEQAAKEFVNWLLAGGPSSGAPPPSK

SEQ ID NO: 1260 - protein, 40 aa, Artificial Sequence; identical to SEQ ID NO: 1259
  Synthetic peptide
  MOD_RES (2)..(2): Xaa is Aib
  MISC_FEATURE (16)..(20): Lactam bridge links Glu16 and Lys20
  MOD_RES (40)..(40): Epsilon amine of Lys is attached to Arg-Ac-Cys(PEG), wherein the Ac-Cys(PEG) is a Cys residue comprising an alpha amino group capped with an acetyl group (CH3CO) and comprising a 40 kDa PEG covalently attached to its side chain

SEQ ID NO: 1261 - protein, 40 aa, Artificial Sequence; identical to SEQ ID NO: 761
  Synthetic peptide
  MOD_RES (2)..(2): Xaa is Aib
  MISC_FEATURE (16)..(20): Lactam bridge links Glu16 and Lys20
  MOD_RES (40)..(40): Cys-PEG covalently linked via thioether linkage

SEQ ID NO: 1262 - protein, 40 aa, Artificial Sequence
  Synthetic peptide
  MOD_RES (2)..(2): Xaa is Aib
HXQGTFTSDYSKYLDERRAQDFVQWLMNTGPSSGAPPPSK

SEQ ID NO: 1263-1300 - skipped (38 entries)

SEQ ID NO: 1301 - protein, 29 aa, Homo sapiens
HSQGTFTSDYSKYLDSRRAQDFVQWLMNT

SEQ ID NO: 1302 - protein, 28 aa, Artificial Sequence
  Synthetic Polypeptide
  MISC_FEATURE: Glucagon analogue
  MISC_FEATURE (8)..(8): Xaa is aspartic acid, glutamic acid, cysteic acid or homocysteic acid
SQGTFTSXYSKYLDSRRAQDFVQWLMNT

SEQ ID NO: 1303 - protein, 27 aa, Artificial Sequence
  Synthetic Polypeptide
  MISC_FEATURE: Glucagon analogue
  MISC_FEATURE (7)..(7): Xaa is aspartic acid, glutamic acid, cysteic acid or homocysteic acid
QGTFTSXYSKYLDSRRAQDFVQWLMNT

SEQ ID NO: 1304 - protein, 26 aa, Artificial Sequence
  Synthetic Polypeptide
  MISC_FEATURE: Glucagon analogue
  MISC_FEATURE (6)..(6): Xaa is aspartic acid, glutamic acid, cysteic acid or homocysteic acid
GTFTSXYSKYLDSRRAQDFVQWLMNT

SEQ ID NO: 1305 - protein, 25 aa, Artificial Sequence
  Synthetic Polypeptide
  MISC_FEATURE: Glucagon analogue
  MISC_FEATURE (5)..(5): Xaa is aspartic acid, glutamic acid, cysteic acid or homocysteic acid
TFTSXYSKYLDSRRAQDFVQWLMNT

SEQ ID NO: 1306 - protein, 24 aa, Artificial Sequence
  Synthetic Polypeptide
  MISC_FEATURE: Glucagon analogue
  MISC_FEATURE (4)..(4): Xaa is glutamic acid, cysteic acid or homocysteic acid
  MISC_FEATURE (22)..(22): Xaa at position 22 is Met, Leu or Nle
FTSXYSKYLDSRRAQDFVQWLXNT

SEQ ID NO: 1307 - protein, 24 aa, Artificial Sequence
  Synthetic Polypeptide
  MOD_RES (1)..(1): N-terminal amino group replaced with hydroxy group
  MISC_FEATURE (4)..(4): Xaa is aspartic acid, glutamic acid, cysteic acid or homocysteic acid
  MISC_FEATURE (22)..(22): Xaa is Met, Leu or Nle
FTSXYSKYLDSRRAQDFVQWLXNT

SEQ ID NO: 1308 - protein, 24 aa, Artificial Sequence
  Synthetic Polypeptide
  MOD_RES (1)..(1): N-terminal amino group replaced with hydroxy group
  MISC_FEATURE (22)..(22): Xaa is  Met, Leu or Nle
  MOD_RES (24)..(24): C-terminal alpha carboxylate replaced with amide
FTSDYSRYLDSRRAQDFVQWLXNT

SEQ ID NO: 1309 - protein, 24 aa, Artificial Sequence
  Synthetic Polypeptide
  MISC_FEATURE: Glucagon analogue
  MOD_RES (1)..(1): N-terminal amino group replaced with hydroxy group
  MISC_FEATURE (4)..(4): Xaa is aspartic acid, glutamic acid, cysteic acid or homocysteic acid
  MISC_FEATURE (7)..(7): Xaa is Lys or Arg
  MISC_FEATURE (11)..(11): Xaa is Lys, Cys, Orn, homocysteine or acetyl phenyalanine
  MISC_FEATURE (22)..(22): Xaa is Met, Leu or Nle
FTSXYSXYLDXRRAQDFVQWLXNT

SEQ ID NO: 1310 - protein, 24 aa, Artificial Sequence
  Synthetic Polypeptide
  MISC_FEATURE: Glucagon analogue
  MOD_RES (1)..(1): N-terminal amino group replaced with hydroxy group
  MISC_FEATURE (4)..(4): Xaa is aspartic acid, glutamic acid, cysteic acid or homocysteic acid
  MISC_FEATURE (7)..(7): Xaa is is Lys or Arg
  MISC_FEATURE (16)..(16): Xaa is Lys, Cys, Orn, homocysteine or acetyl phenylalanine
  MISC_FEATURE (22)..(22): Xaa is Met, Leu or Nle
FTSXYSXYLDSRRAQXFVQWLXNT

SEQ ID NO: 1311 - protein, 24 aa, Artificial Sequence
  Synthetic Polypetide
  MISC_FEATURE: Glucagon analogue
  MOD_RES (1)..(1): N-terminal amino group replaced with hydroxy group
  MISC_FEATURE (4)..(4): Xaa is aspartic acid, glutamic acid, cysteic acid or homocysteic acid
  MISC_FEATURE (7)..(7): Xaa is Lys or Arg
  MISC_FEATURE (19)..(19): Xaa is Lys, Cys, Orn, homocysteine or acetyl phenylalanine
  MISC_FEATURE (22)..(22): Xaa is Met, Leu or Nle
FTSXYSXYLDSRRAQDFVXWLXNT

SEQ ID NO: 1312 - protein, 24 aa, Artificial Sequence
  Synthetic Polypeptide
  MISC_FEATURE: Glucagon analogue
  MOD_RES (1)..(1): N-terminal amino group replaced with hydroxy group
  MISC_FEATURE (4)..(4): Xaa is aspartic acid, glutamic acid, cysteic acid or homocysteic acid
  MISC_FEATURE (7)..(7): Xaa is Lys or Arg
  MISC_FEATURE (11)..(11): Xaa is Lys, Cys, Orn, homocysteine or acetyl phenylalanine
  MISC_FEATURE (19)..(19): Xaa is Lys, Cys, Orn, homocysteine or acetyl phenylalanine
  MISC_FEATURE (22)..(22): Xaa is Met, Leu or Nle
FTSXYSXYLDXRRAQDFVXWLXNT

SEQ ID NO: 1313 - protein, 24 aa, Artificial Sequence
  Synthetic Polypeptide
  MISC_FEATURE: Glucagon analogue
  MOD_RES (1)..(1): N-terminal amino group replaced with hydroxy group
  MISC_FEATURE (4)..(4): Xaa is aspartic acid, glutamic acid, cysteic acid or homocysteic acid
  MOD_RES (11)..(11): Pegylated
  MISC_FEATURE (22)..(22): Xaa is Met, Leu or Nle
FTSXYSKYLDCRRAQDFVQWLXNT

SEQ ID NO: 1314 - protein, 24 aa, Artificial Sequence
  Synthetic Polypeptide
  MISC_FEATURE: Glucagon analogue
  MOD_RES (1)..(1): N-terminal amino group replaced with hydroxy group
  MISC_FEATURE (4)..(4): Xaa is aspartic acid, glutamic acid, cysteic acid or homocysteic acid
  MOD_RES (19)..(19): Pegylated
  MISC_FEATURE (22)..(22): Xaa is Met, Leu or Nle
FTSXYSKYLDSRRAQDFVCWLXNT

SEQ ID NO: 1315 - protein, 24 aa, Artificial Sequence
  Synthetic Polypeptide
  MISC_FEATURE: Glucagon analogue
  MOD_RES (1)..(1): N-terminal amino group replaced with hydroxy group
  MISC_FEATURE (4)..(4): Xaa is aspartic acid, glutamic acid, cysteic acid or homocysteic acid
  MISC_FEATURE (22)..(22): Xaa is Met, Leu or Nle
  MOD_RES (24)..(24): Pegylated
FTSXYSKYLDSRRAQDFVQWLXNC

SEQ ID NO: 1316 - protein, 24 aa, Artificial Sequence
  Synthetic Polypeptide
  MISC_FEATURE: Glucagon analogue
  MOD_RES (1)..(1): N-terminal amino group replaced with hydroxy group
  MISC_FEATURE (4)..(4): Xaa is aspartic acid, glutamic acid, cysteic acid or homocysteic acid
  MOD_RES (19)..(19): Pegylated
  MISC_FEATURE (22)..(22): Xaa is Met, Leu or Nle
FTSXYSRYLDSRRAQDFVKWLXNT

SEQ ID NO: 1317 - protein, 24 aa, Artificial Sequence
  Synthetic Polypeptide
  MISC_FEATURE: Glucagon analogue
  MOD_RES (1)..(1): N-terminal amino group replaced with hydroxy group
  MISC_FEATURE (4)..(4): Xaa is aspartic acid, glutamic acid, cysteic acid or homocysteic acid
  MOD_RES (11)..(11): Pegylated
  MISC_FEATURE (22)..(22): Xaa is Met, Leu or Nle
FTSXYSKYLDCRRAQDFVCWLXNT

SEQ ID NO: 1318 - protein, 24 aa, Artificial Sequence
  Synthetic Polypeptide
  MISC_FEATURE: Glucagon analogue
  MOD_RES (1)..(1): N-terminal amino group replaced with hydroxy group
  MISC_FEATURE (4)..(4): Xaa is aspartic acid, glutamic acid, cysteic acid or homocysteic acid
  MISC_FEATURE (22)..(22): Xaa is Met, Leu or Nle
  MOD_RES (24)..(24): C-terminal alpha carboxylate replaced with amide
FTSXYSKYLECRRAQDFVQWLXNT

SEQ ID NO: 1319 - protein, 10 aa, Artificial Sequence
  Synthetic Polypeptide
  MISC_FEATURE: Peptide fragment representing the carboxy terminal 10 amino acids of Exendin-4
GPSSGAPPPS

SEQ ID NO: 1320 - protein, 8 aa, Artificial Sequence
  Synthetic Polypeptide
  MISC_FEATURE: Peptide fragment representing the carboxy terminal 8 amino acids of oxyntomodulin
KRNRNNIA

SEQ ID NO: 1321 - protein, 4 aa, Artificial Sequence
  Synthetic Polypeptide
  MISC_FEATURE: Peptide fragment representing the carboxy 4 amino acids of oxyntomodulin carboxy terminus
KRNR

SEQ ID NO: 1322 - protein, 24 aa, Artificial Sequence
  Synthetic Polypeptide
  MISC_FEATURE: Glucagon analogue
  MISC_FEATURE (7)..(7): Xaa is Lys or Arg
  MISC_FEATURE (11)..(11): Xaa is Lys, Cys, Orn, homocycstein or acetyl phenyalanine
  MISC_FEATURE (19)..(19): Xaa is Lys, Cys, Orn, homocycstein or acetyl phenyalanine
FTSRYSXYLDXRRAQDFVXWLMNT

SEQ ID NO: 1323 - protein, 34 aa, Artificial Sequence
  Synthetic Polypeptide
  MISC_FEATURE: Glucagon analogue
  MISC_FEATURE (4)..(4): Xaa is aspartic acid, glutamic acid, cysteic acid or homocysteic acid
  MISC_FEATURE (7)..(7): Xaa is Lys or Arg
  MISC_FEATURE (16)..(16): Xaa is Lys, Cys, Orn, homocysteine or acetyl phenylalanine
  MISC_FEATURE (22)..(22): Xaa is Met, Leu or Nle
FTSXYSXYLDSRRAQXFVQWLXNTGPSSGAPPPS

SEQ ID NO: 1324 - protein, 32 aa, Artificial Sequence
  Synthetic Polypeptide
  MISC_FEATURE: Glucagon analogue
  MISC_FEATURE (4)..(4): Xaa is aspartic acid, glutamic acid, cysteic acid or homocysteic acid
  MISC_FEATURE (7)..(7): Xaa is Lys or Arg
  MISC_FEATURE (19)..(19): Xaa is Lys, Cys, Orn, homocysteine or acetyl phenylalanine
  MOD_RES (19)..(19): Pegylated
  MISC_FEATURE (22)..(22): Xaa is Met, Leu or Nle
FTSXYSXYLDSRRAQDFVXWLXNTKRNRNNIA

SEQ ID NO: 1325 - protein, 34 aa, Artificial Sequence
  Synthetic Polypeptide
  MISC_FEATURE: Glucagon analogue
  MISC_FEATURE (4)..(4): Xaa is aspartic acid, glutamic acid, cysteic acid or homocysteic acid
  MISC_FEATURE (7)..(7): Xaa is Lys or Arg
  MISC_FEATURE (19)..(19): Xaa is Lys, Cys, Orn, homocysteine or acetyl phenylalanine
  MOD_RES (19)..(19): Pegylated
  MISC_FEATURE (22)..(22): Xaa is Met, Leu or Nle
FTSXYSXYLDSRRAQDFVXWLXNTGPSSGAPPPS

SEQ ID NO: 1326 - protein, 32 aa, Artificial Sequence
  Synthetic Polypeptide
  MISC_FEATURE: Glucagon analogue
  MISC_FEATURE (4)..(4): Xaa is aspartic acid, glutamic acid, cysteic acid or homocysteic acid
  MISC_FEATURE (7)..(7): Xaa is Lys or Arg
  MISC_FEATURE (16)..(16): Xaa is Lys, Cys, Orn, homocysteine or acetyl phenylalanine
  MOD_RES (16)..(16): Pegylation
  MISC_FEATURE (22)..(22): Xaa is Met, Leu or Nle
FTSXYSXYLDSRRAQXFVQWLXNTKRNRNNIA

SEQ ID NO: 1327 - protein, 28 aa, Artificial Sequence
  Synthetic Polypeptide
  MISC_FEATURE: Glucagon analogue
  MISC_FEATURE (4)..(4): Xaa is aspartic acid, glutamic acid, cysteic acid or homocysteic acid
  MISC_FEATURE (7)..(7): Xaa is Lys or Arg
  MISC_FEATURE (16)..(16): Xaa is Lys, Cys, Orn, homocysteine or acetyl phenylalanine
  MOD_RES (16)..(16): Pegylated
  MISC_FEATURE (22)..(22): Xaa is Met, Leu or Nle
FTSXYSXYLDSRRAQXFVQWLXNTKRNR

SEQ ID NO: 1328 - protein, 28 aa, Artificial Sequence
  Synthetic Polypeptide
  MISC_FEATURE: Glucagon analogue
  MISC_FEATURE (4)..(4): Xaa is aspartic acid, glutamic acid, cysteic acid or homocysteic acid
  MISC_FEATURE (7)..(7): Xaa is Lys or Arg
  MISC_FEATURE (19)..(19): Xaa is Lys, Cys, Orn, homocysteine or acetyl phenylalanine
  MOD_RES (19)..(19): Pegylated
  MISC_FEATURE (22)..(22): Xaa is Met, Leu or Nle
FTSXYSXYLDSRRAQDFVXWLXNTKRNR

SEQ ID NO: 1329 - protein, 34 aa, Artificial Sequence
  Synthetic Polypeptide
  MISC_FEATURE: Glucagon analogue
  MOD_RES (1)..(1): N-terminal amino group replaced with hydroxy group
  MISC_FEATURE (4)..(4): Xaa is aspartic acid, glutamic acid, cysteic acid or homocysteic acid
  MISC_FEATURE (22)..(22): Xaa is Met, Leu or Nle
FTSXYSKYLDSRRAQDFVQWLXNTGPSSGAPPPS

SEQ ID NO: 1330 - protein, 32 aa, Artificial Sequence
  Synthetic Polypeptide
  MISC_FEATURE: Glucagon analogue
  MOD_RES (1)..(1): N-terminal amino group replaced with hydroxy group
  MISC_FEATURE (4)..(4): Xaa is aspartic acid, glutamic acid, cysteic acid or homocysteic acid
  MISC_FEATURE (22)..(22): Xaa is Met, Leu or Nle
FTSXYSKYLDSRRAQDFVQWLXNTKRNRNNIA

SEQ ID NO: 1331 - protein, 28 aa, Artificial Sequence
  Synthetic Polypeptide
  MISC_FEATURE: Glucagon analogue
  MOD_RES (1)..(1): N-terminal amino group replaced with hydroxy group
  MISC_FEATURE (4)..(4): Xaa is aspartic acid, glutamic acid, cysteic acid or homocysteic acid
  MISC_FEATURE (22)..(22): Xaa is Met, Leu or Nle
FTSXYSKYLDSRRAQCFVQWLXNTKRNR

SEQ ID NO: 1332 - protein, 29 aa, Artificial Sequence
  Synthetic Polypeptide
  MISC_FEATURE: Glucagon analogue
HSQGTFTSDYSKYLDSCRAQDFVQWLMNT

SEQ ID NO: 1333 - protein, 39 aa, Artificial Sequence; identical to SEQ ID NO: 521
  Synthetic Polypeptide
  MISC_FEATURE: Glucagon analogue

SEQ ID NO: 1334 - protein, 29 aa, Artificial Sequence
  Synthetic Polypeptide
  MISC_FEATURE: Glucagon analogue
  MOD_RES (24)..(24): 2-butyrolactone bound through thiol group of Cysteine
HSQGTFTSDYSKYLDSRRAQCFVQWLMNT

SEQ ID NO: 1335 - protein, 29 aa, Artificial Sequence
  Synthetic Polypeptide
  MISC_FEATURE: Glucagon Analogue
  MOD_RES (24)..(24): Carboxymethyl group bound through thiol group of Cysteine
HSQGTFTSDYSKYLDSRRAQCFVQWLMNT

SEQ ID NO: 1336 - protein, 24 aa, Artificial Sequence
  Synthetic Polypeptide
  MISC_FEATURE: Glucagon analogue
  MOD_RES (1)..(1): N-terminal amino group replaced with hydroxy group
  MISC_FEATURE (4)..(4): Xaa is aspartic acid, glutamic acid, cysteic acid or homocysteic acid
  MISC_FEATURE (22)..(22): Xaa is Met, Leu or Nle
FTSXYSKYLESRRAQDFVQWLXNT

SEQ ID NO: 1337 - protein, 24 aa, Artificial Sequence
  Synthetic Polypeptide
  MISC_FEATURE: Glucagon analogue
  MOD_RES (1)..(1): N-terminal amino group replaced with hydroxy group
  MISC_FEATURE (22)..(22): Xaa is Met, Leu or Nle
FTSDYSKYLDSRRAQDFVQWLXNT

SEQ ID NO: 1338 - protein, 24 aa, Artificial Sequence
  Synthetic Polypeptide
  MISC_FEATURE: Glucagon analogue
  MOD_RES (1)..(1): N-terminal amino group replaced with hydroxy group
  MISC_FEATURE (22)..(22): Xaa is Met, Leu or Nle
FTSDYSKYLESRRAQDFVQWLXNT

SEQ ID NO: 1339 - protein, 24 aa, Artificial Sequence
  Synthetic Polypeptide
  MISC_FEATURE: Glucagon analogue
  MISC_FEATURE (1)..(1): N-terminal amino group replaced with hydroxy group
  MISC_FEATURE (4)..(4): Xaa is aspartic acid, glutamic acid, cysteic acid or homocysteic acid
  MISC_FEATURE (22)..(22): Xaa is Met, Leu or Nle
  MISC_FEATURE (23)..(23): Xaa is Asn, Asp, Glu, cysteic acid or homocysteic acid
  MISC_FEATURE (24)..(24): Xaa id Thr, Asp, Glu, cysteic acid or homocysteic acid
FTSXYSKYLDSRRAQDFVQWLXXX

SEQ ID NO: 1340 - protein, 24 aa, Artificial Sequence
  Synthetic Polypeptide
  MISC_FEATURE: Glucagon analogue
  MOD_RES (1)..(1): N-terminal amino group replaced with hydroxy group
  MISC_FEATURE (4)..(4): Xaa is aspartic acid, glutamic acid, cysteic acid or homocysteic acid
  MISC_FEATURE (10)..(10): Xaa is Glu, cysteic acid, homoglutamic acid or homocysteic acid
  MISC_FEATURE (22)..(22): Xaa is Met, Leu or Nle
  MISC_FEATURE (23)..(23): Xaa is Asn or an acidic amino acid
  MISC_FEATURE (24)..(24): Xaa is Thr or an acidic amino acid
FTSXYSKYLXSRRAQDFVQWLXXX

SEQ ID NO: 1341 - protein, 24 aa, Artificial Sequence
  Synthetic Polypeptide
  MISC_FEATURE: Glucagon analogue
  MOD_RES (1)..(1): N-terminal amino group replaced with hydroxy group
  MISC_FEATURE (4)..(4): Xaa is aspartic acid, glutamic acid, cysteic acid or homocysteic acid
  MISC_FEATURE (10)..(10): Xaa is Glu, cysteic acid, homoglutamic acid or homocysteic acid
  MISC_FEATURE (22)..(22): Xaa is Met, Leu or Nle
  MISC_FEATURE (23)..(23): Xaa is Asn, Asp or Glu
  MISC_FEATURE (24)..(24): Xaa is Thr, glu or Asp
FTSXYSKYLXSRRAQDFVQWLXXX

SEQ ID NO: 1342 - protein, 24 aa, Artificial Sequence
  Synthetic Polypeptide
  MISC_FEATURE: Glucagon analogue
  MOD_RES (1)..(1): N-terminal amino group replaced with hydroxy group
  MISC_FEATURE (4)..(4): Xaa is aspartic acid, glutamic acid, cysteic acid or homocysteic acid
  MISC_FEATURE (10)..(10): Xaa is Glu, cysteic acid, homoglutamic acid or homocysteic acid
  MISC_FEATURE (22)..(22): Xaa is Met, Leu or Nle
  MISC_FEATURE (23)..(23): Xaa is Asn or an acidic amino acid
  MISC_FEATURE (24)..(24): Xaa is Thr or an acidic amino acid
FTSXYSKYLXSRRAQDFVQWLXXX

SEQ ID NO: 1343 - protein, 24 aa, Artificial Sequence
  Synthetic Polypeptide
  MISC_FEATURE: Glucagon analogue
  MOD_RES (1)..(1): N-terminal amino group replaced with hydroxy group
  MISC_FEATURE (4)..(4): Xaa is aspartic acid, glutamic acid, cysteic acid or homocysteic acid
  MISC_FEATURE (10)..(10): Xaa is Asp, Glu, cysteic acid, homoglutamic acid or homocysteic acid
  MOD_RES (11)..(11): 20kDa PEG group attached to Xaa at position 11
  MISC_FEATURE (22)..(22): Xaa is Met, Leu or Nle
  MISC_FEATURE (23)..(23): Xaa is Asn or an acidic amino acid
  MISC_FEATURE (24)..(24): Xaa is Thr or an acidic amino acid
FTSXYSKYLXCRRAQDFVQWLXXX

SEQ ID NO: 1344 - protein, 24 aa, Artificial Sequence
  Synthetic Polypeptide
  MISC_FEATURE: Glucagon analogue
  MOD_RES (1)..(1): N-terminal amino group replaced with hydroxy group
  MISC_FEATURE (4)..(4): Xaa is aspartic acid, glutamic acid, cysteic acid or homocysteic acid
  MISC_FEATURE (10)..(10): Xaa is Asp, Glu, cysteic acid, homoglutamic acid or homocysteic acid
  MOD_RES (16)..(16): 20kDa PEG group attached to Xaa at position 16
  MISC_FEATURE (22)..(22): Xaa is Met, Leu or Nle
  MISC_FEATURE (23)..(23): Xaa is Asn or an acidic amino acid
  MISC_FEATURE (24)..(24): Xaa is Thr or an acidic amino acid
FTSXYSKYLXSRRAQCFVQWLXXX

SEQ ID NO: 1345 - protein, 24 aa, Artificial Sequence
  Synthetic Polypeptide
  MISC_FEATURE: Glucagon analogue
  MOD_RES (1)..(1): N-terminal amino group replaced with hydroxy group
  MISC_FEATURE (4)..(4): Xaa is aspartic acid, glutamic acid, cysteic acid or homocysteic acid
  MISC_FEATURE (10)..(10): Xaa is Asp, Glu, cysteic acid, homoglutamic acid or homocysteic acid
  MOD_RES (19)..(19): Pegylated
  MISC_FEATURE (22)..(22): Xaa is Met, Leu or Nle
  MISC_FEATURE (23)..(23): Xaa is Asn or an acidic amino acid
  MISC_FEATURE (24)..(24): Xaa is Thr or an acidic amino acid
FTSXYSKYLXSRRAQDFVCWLXXX

SEQ ID NO: 1346 - protein, 35 aa, Artificial Sequence
  Synthetic Polypeptide
  MISC_FEATURE: Glucagon analogue
  MOD_RES (1)..(1): N-terminal amino group replaced with hydroxy group
  MISC_FEATURE (4)..(4): Xaa is aspartic acid, glutamic acid, cysteic acid or homocysteic acid
  MISC_FEATURE (10)..(10): Xaa is Asp, Glu, cysteic acid, homoglutamic acid or homocysteic acid
  MISC_FEATURE (22)..(22): Xaa is Met, Leu or Nle
  MISC_FEATURE (23)..(23): Xaa is Asn or an acidic amino acid
  MISC_FEATURE (24)..(24): Xaa is Thr or an acidic amino acid
  MISC_FEATURE (25)..(25): Xaa is Lys, Cys, Orn, homocycstein or acetyl phenyalanine
  MOD_RES (25)..(25): Pegylated
FTSXYSKYLXSRRAQDFVQWLXXXXGPSSGAPPPS

SEQ ID NO: 1347 - protein, 35 aa, Artificial Sequence
  Synthetic Polypeptide
  MISC_FEATURE: Glucagon analogue
  MOD_RES (1)..(1): N-terminal amino group replaced with hydroxy group
  MISC_FEATURE (4)..(4): Xaa is aspartic acid, glutamic acid, cysteic acid or homocysteic acid
  MISC_FEATURE (10)..(10): Xaa is Asp, Glu, cysteic acid, homoglutamic acid or homocysteic acid
  MISC_FEATURE (22)..(22): Xaa is Met, Leu or Nle
  MISC_FEATURE (23)..(23): Xaa is Asn or an acidic amino acid
  MISC_FEATURE (24)..(24): Xaa is Thr or an acidic amino acid
  MISC_FEATURE (35)..(35): Xaa is Lys, Cys, Orn, homocysteine or acetyl phenyalanine
  MOD_RES (35)..(35): Pegylated
FTSXYSKYLXSRRAQDFVQWLXXXGPSSGAPPPSX

SEQ ID NO: 1348 - protein, 39 aa, Artificial Sequence
  Synthetic Polypeptide
  MISC_FEATURE: Glucagon analogue
HSQGTFTSDYSRYLDSRRAQDFVQWLMNTGPSSGAPPPS

SEQ ID NO: 1349 - protein, 35 aa, Artificial Sequence
  Synthetic Polypeptide
  MISC_FEATURE: Glucagon analogue
  MOD_RES (1)..(1): N-terminal amino group replaced with hydroxy group
  MISC_FEATURE (4)..(4): Xaa is aspartic acid, glutamic acid, cysteic acid or homocysteic acid
  MISC_FEATURE (7)..(7): Xaa is Lys or Arg
  MISC_FEATURE (22)..(22): Xaa is Met , Leu or Nle
  MISC_FEATURE (35)..(35): Xaa is Lys, Cys, Orn, homocysteine or acetyl phenyalanine
  MOD_RES (35)..(35): Pegylated
FTSXYSXYLDSRRAQDFVQWLXNTGPSSGAPPPSX

SEQ ID NO: 1350 - protein, 24 aa, Artificial Sequence
  Synthetic Polypeptide
  MISC_FEATURE: Glucagon analogue
  MOD_RES (1)..(1): N-terminal amino group replaced with hydroxy group
FTSEYSKYLDSRRAQDFVQWLMNT

SEQ ID NO: 1351 - protein, 20 aa, Artificial Sequence
  Synthetic Polypeptide
  MISC_FEATURE: Glucagon analogue
YSKYLDSRRAQDFVQWLMNT

SEQ ID NO: 1352 - protein, 24 aa, Artificial Sequence
  Synthetic Polypeptide
  MISC_FEATURE: Glucagon analogue
  MISC_FEATURE (4)..(4): Xaa is Homocysteic acid
FTSXYSKYLDSRRAQDFVQWLMNT

SEQ ID NO: 1353 - protein, 11 aa, Artificial Sequence
  Synthetic Polypeptide
  MISC_FEATURE: Peptide fragment representing the carboxy terminal 10 amino acids of Exendin-4
  MISC_FEATURE (11)..(11): Xaa is Lys, Cys, Orn, homocysteine or acetyl phenyalanine
GPSSGAPPPSX

SEQ ID NO: 1354 - protein, 6 aa, Artificial Sequence
  Synthetic Polypeptide
  MISC_FEATURE (6)..(6): Xaa is phenyl lactic acid
HSQGTX

SEQ ID NO: 1355 - protein, 5 aa, Artificial Sequence
  Synthetic Polypeptide
  MISC_FEATURE (5)..(5): Xaa is phenyl lactic acid
SQGTX

SEQ ID NO: 1356 - protein, 4 aa, Artificial Sequence
  Synthetic Polypeptide
  MISC_FEATURE (4)..(4): Xaa is phenyl lactic acid
QGTX

SEQ ID NO: 1357 - protein, 3 aa, Artificial Sequence
  Synthetic Polypeptide
  MISC_FEATURE (3)..(3): Xaa is phenyl lactic acid
GTX

SEQ ID NO: 1358 - protein, 2 aa, Artificial Sequence
  Synthetic Polypeptide
  MISC_FEATURE (2)..(2): Xaa is phenyl lactic acid
TX

SEQ ID NO: 1359 - protein, 6 aa, Artificial Sequence
  Synthetic Polypeptide
  MISC_FEATURE (1)..(1): Xaa is selected from a group consisting of His, D-histidine, alpha, alpha-dimethyl imidiazole acetic acid (DMIA), N-methyl histidine, alpha-methyl histidine, imidazole acetic acid, desaminohistidine, hydroxyl-histidine, acetyl-histidine and
  MISC_FEATURE (2)..(2): Xaa is selected from a group consisting of Ser, D-serine, D-alanine, Val, Gly, N-methyl serine, N-methyl alanine, and aminoisobutyric acid (AIB)
  MISC_FEATURE (3)..(3): Xaa is selected from a group consisting of Glu or Gln
  MISC_FEATURE (6)..(6): Xaa is phenyl lactic acid
XXXGTX

SEQ ID NO: 1360 - protein, 5 aa, Artificial Sequence
  Synthetic Polypeptide
  MISC_FEATURE (1)..(1): Xaa is selected from a group consisting of Ser, D-serine, D-alanine, Val, Gly, N-methyl serine, N-methyl alanine, and aminoisobutyric acid (AIB)
  MISC_FEATURE (2)..(2): Xaa is selected from a group consisting of Glu or Gln
  MISC_FEATURE (5)..(5): Xaa is phenyl lactic acid
XXGTX

SEQ ID NO: 1361 - protein, 4 aa, Artificial Sequence
  Synthetic Polypeptide
  MISC_FEATURE (1)..(1): Xaa is selected from a group consisting of Glu and Gln
  MISC_FEATURE (4)..(4): Xaa is phenyl lactic acid
XGTX

SEQ ID NO: 1362 - protein, 24 aa, Artificial Sequence
  Synthetic Polypeptide
  MOD_RES (1)..(1): N-terminal amino group replaced with hydroxy group
  MOD_RES (24)..(24): C-terminal alpha carboxylate optionally replaced with amide
FTSDYSKYLDSRRAQDFVQWLMDT

SEQ ID NO: 1363 - protein, 28 aa, Artificial Sequence
  Synthetic Polypeptide
  MOD_RES (28)..(28): C-terminal alpha carboxylate optionally replaced with amide
SQGTFTSEYSKYLDSRRAQDFVQWLMNT

SEQ ID NO: 1364 - protein, 28 aa, Artificial Sequence
  Synthetic Polypeptide
  MISC_FEATURE (4)..(5): Threonine in position 4 and phenyl lactic acid in position 5 linked via ester bond
  MISC_FEATURE (5)..(5): Xaa is phenyl lactic acid
  MOD_RES (28)..(28): Optional C-terminal alpha carboxylate replaced with amide
  MOD_RES (28)..(28): C-terminal alpha carboxylate optionally replaced with amide
SQGTXTSEYSKYLDSRRAQDFVQWLMNT

SEQ ID NO: 1365 - protein, 29 aa, Artificial Sequence
  Synthetic Polypeptide
  MISC_FEATURE (5)..(6): Threonine in position 5 and phenyl lactic acid in position 6 linked via ester bond
  MISC_FEATURE (6)..(6): Xaa is phenyl lactic acid
  MOD_RES (29)..(29): C-terminal alpha carboxylate optionally replaced with amide
HSQGTXTSEYSKYLDSRRAQDFVQWLMNT

SEQ ID NO: 1366 - protein, 24 aa, Artificial Sequence
  Synthetic Polypeptide
  MOD_RES (1)..(1): N-terminal amino group replaced with hydroxy group
  MISC_FEATURE (11)..(11): Xaa is amino isobutyric acid
FTSDYSKYLDXRRAQDFVQWLMNT

SEQ ID NO: 1367 - protein, 24 aa, Artificial Sequence
  Synthetic Polypeptide
  MOD_RES (1)..(1): N-terminal amino group replaced with hydroxy group
FTSDYSKYLDERRAQDFVQWLMNT

SEQ ID NO: 1368 - protein, 6 aa, Artificial Sequence
  Synthetic Polypeptide
  MISC_FEATURE (1)..(1): Xaa is selected from a group consisting of His, D-histidine, alpha, alpha-dimethyl imidiazole acetic acid (DMIA), N-methyl histidine, alpha-methyl histidine, imidazole acetic acid, desaminohistidine, hydroxyl-histidine, acetyl-histidine and
  MISC_FEATURE (2)..(2): Xaa is selected from a group consisting of Ser, D-serine, D-alanine, Val, Gly, N-methyl serine, N-methyl alanine, and aminoisobutyric acid (AIB)
  MISC_FEATURE (3)..(3): Xaa is selected from a group consisting of Glu or Gln
XXXTGF

SEQ ID NO: 1369 - protein, 5 aa, Artificial Sequence
  Synthetic Polypeptide
  MISC_FEATURE (1)..(1): Xaa is selected from a group consisting of Ser, D-serine, D-alanine, Val, Gly, N-methyl serine, N-methyl alanine, and aminoisobutyric acid (AIB)
  MISC_FEATURE (2)..(2): Xaa is selected from a group consisting of Glu or Gln
XXTGF

SEQ ID NO: 1370 - protein, 4 aa, Artificial Sequence
  Synthetic Polypeptide
  MISC_FEATURE (1)..(1): Xaa is selected from a group consisting of Glu or Gln
XTGF

SEQ ID NO: 1371 - protein, 24 aa, Artificial Sequence
  Synthetic Polypeptide
  MOD_RES (1)..(1): N-terminal amino group replaced with hydroxy group
  MISC_FEATURE (24)..(24): C-terminal alpha carboxylate optionally replaced with an amide
FTSEYSKYLDSRRAQDFVQWLMNT

SEQ ID NO: 1372-1400 - skipped (29 entries)

SEQ ID NO: 1401 - protein, 29 aa, Homo sapiens
HSQGTFTSDYSKYLDSRRAQDFVQWLMNT

SEQ ID NO: 1402 - protein, 24 aa, Artificial Sequence
  Synthetic Polypeptide
  MISC_FEATURE: Glucagon analogue
  MOD_RES (1)..(1): N-terminal amino group replaced with hydroxy group
FTSDYSKYLDSRRAQDFVQWLMNT

SEQ ID NO: 1403 - protein, 31 aa, Homo sapiens; identical to SEQ ID NO: 703

SEQ ID NO: 1404 - protein, 30 aa, Homo sapiens; identical to SEQ ID NO: 704

SEQ ID NO: 1405 - protein, 24 aa, Artificial Sequence
  Synthetic Polypeptide
  MISC_FEATURE: Glucagon analogue
  MOD_RES (1)..(1): N-terminal amino group replaced with hydroxy group
FTSDYSKYLDERRAQDFVQWLMNT

SEQ ID NO: 1406 - protein, 24 aa, Artificial Sequence
  Synthetic Polypeptide
  MOD_RES (1)..(1): N-terminal amino group replaced with hydroxy group
FTSDYSKYLDERRAKDFVQWLMNT

SEQ ID NO: 1407 - protein, 24 aa, Artificial Sequence
  Synthetic Polypeptide
  MISC_FEATURE: Glucagon analogue
  MOD_RES (1)..(1): N-terminal amino group replaced with hydroxy group
  MISC_FEATURE (11)..(11): Xaa is Ser or Glu
FTSDYSKYLDXRRAKDFVEWLMNT

SEQ ID NO: 1408 - protein, 24 aa, Artificial Sequence
  Synthetic Polypeptide
  MISC_FEATURE: Glucagon analogue
  MOD_RES (1)..(1): N-terminal amino group replaced with hydroxy group
  MISC_FEATURE (11)..(11): Xaa is Ser or Glu
FTSDYSKYLDXRRAQDFVEWLMKT

SEQ ID NO: 1409 - protein, 24 aa, Artificial Sequence
  Synthetic Polypeptide
  MISC_FEATURE: Glucagon analogue
  MOD_RES (1)..(1): N-terminal amino group replaced with hydroxy group
  MISC_FEATURE (7)..(7): Xaa at position 7 is Lys or Glu
  MISC_FEATURE (10)..(10): Xaa is Asp, Glu, homoglutamic acid, cysteic acid or homocysteic acid
  MISC_FEATURE (11)..(11): Xaa is Ala, Ser, Glu, Lys, homoglutamic acid or homocysteic acid
  MISC_FEATURE (15)..(15): Xaa is Gln, Glu or Lys
  MISC_FEATURE (19)..(19): Xaa is Ala, Gln, Lys or Glu
  MISC_FEATURE (23)..(23): Xaa is Asn, Lys or an acidic amino acid
  MISC_FEATURE (24)..(24): Xaa is Thr or an acidic amino acid
FTSDYSXYLXXRRAXDFVXWLMXX

SEQ ID NO: 1410 - protein, 24 aa, Artificial Sequence
  Synthetic Polypeptide
  MISC_FEATURE: Glucagon analogue
  MOD_RES (1)..(1): N-terminal amino group replaced with hydroxy group
  MISC_FEATURE (11)..(11): Xaa is Ala, Ser, Glu, Gln, homoglutamic acid or homocysteic acid
  MISC_FEATURE (15)..(15): Xaa is Gln or Lys
  MISC_FEATURE (19)..(19): Xaa is Ala, Gln or Glu
  MISC_FEATURE (23)..(23): Xaa is Asn, Lys or an acidic amino acid
FTSDYSKYLDXRRAXDFVXWLMXT

SEQ ID NO: 1411 - protein, 24 aa, Artificial Sequence
  Synthetic Polypeptide
  MISC_FEATURE: Glucagon analogue
  MOD_RES (1)..(1): N-terminal amino group replaced with hydroxy group
  MISC_FEATURE (11)..(11): Xaa is Ala, Ser, Glu, Gln, homoglutamic acid or homocysteic acid
  MISC_FEATURE (15)..(15): Xaa is Gln or Lys
FTSDYSKYLDXRRAXDFVQWLMNT

SEQ ID NO: 1412 - protein, 24 aa, Artificial Sequence
  Synthetic Polypeptide
  MISC_FEATURE: Glucagon analogue
  MOD_RES (1)..(1): N-terminal amino group replaced with hydroxy group
  MISC_FEATURE (4)..(4): Xaa is aspartic acid, glutamic acid, cysteic acid or homocysteic acid
  MISC_FEATURE (7)..(7): Xaa is Lys or Arg
  MISC_FEATURE (15)..(15): Xaa is Lys or Gln
  MISC_FEATURE (16)..(16): Xaa is Lys, Cys, Orn, homocysteine or acetyl phenyalanine
  MOD_RES (16)..(16): Pegylated
  MISC_FEATURE (19)..(19): Xaa is Lys, Cys, Orn, homocysteine or acetyl phenylalanine
  MOD_RES (19)..(19): Pegylated
  MISC_FEATURE (22)..(22): Xaa is Met, Leu or Nle
FTSXYSXYLDERRAXXFVXWLXNT

SEQ ID NO: 1413 - protein, 24 aa, Artificial Sequence
  Synthetic Polypeptide
  MISC_FEATURE: Glucagon analogue
  MOD_RES (1)..(1): N-terminal amino group replaced with hydroxy group
  MISC_FEATURE (4)..(4): Xaa is aspartic acid, glutamic acid, cysteic acid or homocysteic acid
  MISC_FEATURE (15)..(15): Xaa is Lys or Gln
  MISC_FEATURE (16)..(16): Xaa is Cys, Orn, homocysteine or acetyl phenyalanine
  MOD_RES (16)..(16): Pegylated
  MISC_FEATURE (22)..(22): Xaa is Met, Leu or Nle
FTSXYSKYLDERRAXXFVQWLXNT

SEQ ID NO: 1414 - protein, 24 aa, Artificial Sequence
  Synthetic Polypeptide
  MISC_FEATURE: Glucagon analogue
  MOD_RES (1)..(1): N-terminal amino group replaced with hydroxy group
  MISC_FEATURE (4)..(4): Xaa is aspartic acid, glutamic acid, cysteic acid or homocysteic acid
  MISC_FEATURE (15)..(15): Xaa is Lys or Gln
  MISC_FEATURE (19)..(19): Xaa is Cys, Orn, homocysteine or acetyl phenylalanine
  MOD_RES (19)..(19): Pegylated
  MISC_FEATURE (22)..(22): Xaa is Met, Leu or Nle
FTSXYSKYLDERRAXDFVXWLXNT

SEQ ID NO: 1415 - protein, 24 aa, Artificial Sequence
  Synthetic Polypeptide
  MISC_FEATURE: Glucagon analogue
  MOD_RES (1)..(1): N-terminal amino group replaced with hydroxy group
  MISC_FEATURE (4)..(4): Xaa is aspartic acid, glutamic acid, cysteic acid, homoglutamic acid or homocysteic acid
  MISC_FEATURE (7)..(7): Xaa is Lys or Glu
  MISC_FEATURE (10)..(10): Xaa is Asp, Glu, cysteic acid, homoglutamic acid or homocysteic acid
  MISC_FEATURE (11)..(11): Xaa is Ala, Ser, Glu, Lys Gln, homoglutamic acid or homocysteic acid
  MISC_FEATURE (15)..(15): Xaa is Arg, Gln, Glu or Lys
  MISC_FEATURE (19)..(19): Xaa is Ala, Gln, Lys or Glu
  MISC_FEATURE (22)..(22): Xaa is Met, Leu or Nle
  MISC_FEATURE (23)..(23): Xaa is Asn, Lys or an acidic amino acid
  MISC_FEATURE (24)..(24): Xaa is Thr or an acidic amino acid
FTSXYSXYLXXRRAXDFVXWLXXX

SEQ ID NO: 1416 - protein, 24 aa, Artificial Sequence
  Synthetic Polypeptide
  MISC_FEATURE: Glucagon analogue
  MOD_RES (1)..(1): N-terminal amino group replaced with hydroxy group
  MISC_FEATURE (7)..(11): Lactam bridge connecting residues 7 and 11
  MISC_FEATURE (10)..(10): Xaa is Glu or Asp
  MISC_FEATURE (22)..(22): Xaa is Met, Leu or Nle
  MISC_FEATURE (23)..(23): Xaa is Asn, Asp or Glu
  MOD_RES (24)..(24): C-terminal alpha carboxylate replaced with amide
FTSDYSKYLXERRAQDFVQWLXXT

SEQ ID NO: 1417 - protein, 24 aa, Artificial Sequence
  Synthetic Polypeptide
  MISC_FEATURE: Glucagon analogue
  MOD_RES (1)..(1): N-terminal amino group replaced with hydroxy group
  MISC_FEATURE (10)..(10): Xaa is Asp or Glu
  MISC_FEATURE (11)..(15): Lactam bridge connecting residues 11 and 15
  MISC_FEATURE (22)..(22): Xaa is Met, Leu or Nle
  MISC_FEATURE (23)..(23): Xaa is Asn, Asp or Glu
  MOD_RES (24)..(24): C-terminal alpha carboxylate replaced with amide
FTSDYSKYLXERRAKDFVQWLXXT

SEQ ID NO: 1418 - protein, 24 aa, Artificial Sequence
  Synthetic Polypeptide
  MISC_FEATURE: Glucagon analogue
  MOD_RES (1)..(1): N-terminal amino group replaced with hydroxy group
  MISC_FEATURE (10)..(10): Xaa is Asp or Glu
  MISC_FEATURE (11)..(11): Xaa is Ser or Glu
  MISC_FEATURE (15)..(19): Lactam bridge connecting residues 15 and 19
  MISC_FEATURE (22)..(22): Xaa is Met, Leu or Nle
  MISC_FEATURE (23)..(23): Xaa is Asn, Asp or Glu
  MOD_RES (24)..(24): C-terminal alpha carboxylate replaced with amide
FTSDYSKYLXXRRAKDFVEWLXXT

SEQ ID NO: 1419 - protein, 24 aa, Artificial Sequence
  Synthetic Polypeptide
  MISC_FEATURE: Glucagon analogue
  MOD_RES (1)..(1): N-terminal amino group replaced with hydroxy group
  MISC_FEATURE (10)..(10): Xaa is Asp or Glu
  MISC_FEATURE (11)..(11): Xaa is Ser or Glu
  MISC_FEATURE (19)..(23): Lactam bridge connecting residues 19 and 23
  MISC_FEATURE (22)..(22): Xaa is Met, Leu or Nle
  MISC_FEATURE (24)..(24): Xaa is Thr or Glu
  MOD_RES (24)..(24): C-terminal alpha carboxylate replaced with amide
FTSDYSKYLXXRRAQDFVEWLXKX

SEQ ID NO: 1420 - protein, 24 aa, Artificial Sequence
  Synthetic Polypeptide
  MISC_FEATURE: Glucagon analogue
  MOD_RES (1)..(1): N-terminal amino group replaced with hydroxy group
  MISC_FEATURE (4)..(4): Xaa is aspartic acid, glutamic acid, cysteic acid or homocysteic acid
  MISC_FEATURE (7)..(7): Xaa is Lys or Glu
  MISC_FEATURE (10)..(10): Xaa is Asp, Glu, cysteic acid, homoglutamic acid or homocysteic acid
  MISC_FEATURE (11)..(11): Xaa is Ala, Ser, Glu, Lys Gln, homoglutamic acid or homocysteine
  MISC_FEATURE (15)..(15): Xaa is Arg, Gln, Glu or Lys
  MISC_FEATURE (19)..(19): Xaa is Ala, Gln, Lys or Glu
  MISC_FEATURE (22)..(22): Xaa is Met, Leu or Nle
  MISC_FEATURE (23)..(23): Xaa is Asn, Lys, Asp, Glu, cysteic acid or homocysteic acid
  MISC_FEATURE (24)..(24): Xaa is Thr, Asp, Glu, cysteic acid and homocysteic acid
FTSXYSXYLXXRRAXDFVXWLXXX

SEQ ID NO: 1421 - protein, 10 aa, Artificial Sequence
  Synthetic Polypeptide
  MISC_FEATURE: Peptide fragment representing the carboxy terminal 10 amino acids of Exendin-4
GPSSGAPPPS

SEQ ID NO: 1422 - protein, 24 aa, Artificial Sequence
  Synthetic Polypeptide
  MISC_FEATURE: Glucagon analogue
  MOD_RES (1)..(1): N-terminal amino group replaced with hydroxy group
  MISC_FEATURE (4)..(4): Xaa is aspartic acid, glutamic acid, cysteic acid or homocysteic acid
  MISC_FEATURE (7)..(11): Lactam bridge connecting residues 7 and 11
  MISC_FEATURE (10)..(10): Xaa is Asp, Glu, cysteic acid, homoglutamic acid and homocysteic acid
  MISC_FEATURE (22)..(22): Xaa is Met, Leu or Nle
FTSXYSKYLXERRAQDFVQWLXNT

SEQ ID NO: 1423 - protein, 24 aa, Artificial Sequence
  Synthetic Polypeptide
  MISC_FEATURE: Glucagon analogue
  MOD_RES (1)..(1): N-terminal amino group replaced with hydroxy group
  MISC_FEATURE (4)..(4): Xaa is aspartic acid, glutamic acid, cysteic acid or homocysteic acid
  MISC_FEATURE (10)..(10): Xaa is Asp, Glu, cysteic acid, homoglutamic acid and homocysteic acid
  MISC_FEATURE (11)..(15): Lactam bridge connecting residues 11 and 15
  MISC_FEATURE (22)..(22): Xaa is Met, Leu or Nle
FTSXYSKYLXERRAKDFVQWLXNT

SEQ ID NO: 1424 - protein, 24 aa, Artificial Sequence
  Synthetic Polypeptide
  MISC_FEATURE: Glucagon analogue
  MOD_RES (1)..(1): N-terminal amino group replaced with hydroxy group
  MISC_FEATURE (4)..(4): Xaa is aspartic acid, glutamic acid, cysteic acid or homocysteic acid
  MISC_FEATURE (10)..(10): Xaa is Asp, Glu, cysteic acid, homoglutamic acid and homocysteic acid
  MISC_FEATURE (15)..(19): Lactam bridge connecting residues 15 and 19
  MISC_FEATURE (22)..(22): Xaa is Met, Leu or Nle
FTSXYSKYLXERRAKDFVEWLXNT

SEQ ID NO: 1425 - protein, 24 aa, Artificial Sequence
  Synthetic Polypeptide
  MISC_FEATURE: Glucagon analogue
  MOD_RES (1)..(1): N-terminal amino group replaced with hydroxy group
  MISC_FEATURE (4)..(4): Xaa is aspartic acid, glutamic acid, cysteic acid or homocysteic acid
  MISC_FEATURE (10)..(10): Xaa is Asp, Glu, cysteic acid, homoglutamic acid and homocysteic acid
  MISC_FEATURE (19)..(24): Lactam bridge connecting residues 19 and 24
  MISC_FEATURE (22)..(22): Xaa is Met, Leu or Nle
FTSXYSKYLXERRAQDFVEWLXKT

SEQ ID NO: 1426 - protein, 8 aa, Artificial Sequence
  Synthetic Polypeptide
  MISC_FEATURE: Peptide fragment representing the carboxy terminal 8 amino acids of oxyntomodulin
KRNRNNIA

SEQ ID NO: 1427 - protein, 4 aa, Artificial Sequence
  Synthetic Polypeptide
  MISC_FEATURE: Peptide fragment representing the carboxy 4 amino acids of oxyntomodulin carboxy terminus
KRNR

SEQ ID NO: 1428 - protein, 34 aa, Artificial Sequence
  Synthetic Polypeptide
  MISC_FEATURE: Glucagon analogue
FTSEYSKYLDERRAQDFVQWLMNTGPSSGAPPPS

SEQ ID NO: 1429 - protein, 34 aa, Artificial Sequence; identical to SEQ ID NO: 1428
  Synthetic Polypeptide
  MISC_FEATURE (7)..(11): Lactam bridge connecting residues 7 and 11

SEQ ID NO: 1430 - protein, 34 aa, Artificial Sequence
  Synthetic Polypeptide
  MISC_FEATURE: Glucagon analogue
  MISC_FEATURE (11)..(15): Lactam bridge connecting residues 11 and 15
FTSEYSKYLDERRAKDFVQWLMNTGPSSGAPPPS

SEQ ID NO: 1431 - protein, 34 aa, Artificial Sequence
  Synthetic Polypeptide
  MISC_FEATURE: Glucagon analogue
  MISC_FEATURE (7)..(11): Lactam bridge connecting residues 7 and 11
FTSDYSKYLDERRAQDFVQWLMNTGPSSGAPPPS

SEQ ID NO: 1432 - protein, 34 aa, Artificial Sequence; identical to SEQ ID NO: 1428
  Synthetic Polypeptide
  MISC_FEATURE: Glucagon analogue
  MOD_RES (1)..(1): N-terminal amino group replaced with hydroxy group
  MISC_FEATURE (7)..(11): Lactam bridge connecting residues 7 and 11

SEQ ID NO: 1433 - protein, 34 aa, Artificial Sequence; identical to SEQ ID NO: 1430
  Synthetic Polypeptide
  MISC_FEATURE: Glucagon analogue
  MOD_RES (1)..(1): N-terminal amino group replaced with hydroxy group
  MISC_FEATURE (11)..(15): Lactam bridge connecting residues 11 and 15

SEQ ID NO: 1434 - protein, 24 aa, Artificial Sequence
  Synthetic Polypeptide
  MISC_FEATURE: Glucagon analogue
  MOD_RES (1)..(1): N-terminal amino group replaced with hydroxy group
FTSDYSKYLDSRRAQDFVQWLMDT

SEQ ID NO: 1435 - protein, 24 aa, Artificial Sequence
  Synthetic Polypeptide
  MISC_FEATURE: Glucagon analogue
  MOD_RES (1)..(1): N-terminal amino group replaced with hydroxy group
  MISC_FEATURE (7)..(11): Lactam bridge connecting residues 7 and 11
FTSEYSKYLDERRAQDFVQWLMNT

SEQ ID NO: 1436 - protein, 24 aa, Artificial Sequence
  Synthetic Polypeptide
  MISC_FEATURE: Glucagon analogue
  MOD_RES (1)..(1): N-terminal amino group replaced with hydroxy group
  MISC_FEATURE (11)..(15): Lactam bridge connecting residues 11 and 15
FTSEYSKYLDERRAKDFVQWLMNT

SEQ ID NO: 1437 - protein, 31 aa, Artificial Sequence
  Synthetic Polypeptide
  MISC_FEATURE: Glucagon analogue
HSQGTFTSDYARYLDARRAREFIKWLVRGRG

SEQ ID NO: 1438 - protein, 24 aa, Artificial Sequence
  Synthetic Polypeptide
  MISC_FEATURE: Glucagon analogue
  MOD_RES (1)..(1): N-terminal amino group replaced with hydroxy group
  MOD_RES (24)..(24): C-terminal alpha carboxylate replaced with amide
FTSDYSKYLDERRAQDFVQWLMNT

SEQ ID NO: 1439 - protein, 24 aa, Artificial Sequence
  Synthetic Polypeptide
  MISC_FEATURE: Glucagon analogue
  MOD_RES (1)..(1): N-terminal amino group replaced with hydroxy group
  MISC_FEATURE (4)..(4): Xaa is aspartic acid, glutamic acid, cysteic acid or homocysteic acid
  MISC_FEATURE (10)..(10): Xaa is Asp, Glu, cysteic acid, homoglutamic acid or homocysteic acid
  MISC_FEATURE (22)..(22): Xaa is Met, Leu or Nle
  MOD_RES (24)..(24): C-terminal alpha carboxylate replaced with amide
FTSXYSKYLXERRAKDFVQWLXNT

SEQ ID NO: 1440 - protein, 29 aa, Artificial Sequence
  Synthetic Polypeptide
  MISC_FEATURE: Glucagon analogue
HSQGTFTSDYSKYLDSCRAQDFVQWLMNT

SEQ ID NO: 1441 - protein, 39 aa, Artificial Sequence; identical to SEQ ID NO: 521
  Synthetic Polypeptide
  MISC_FEATURE: Glucagon Analogue

SEQ ID NO: 1442 - protein, 29 aa, Artificial Sequence
  Synthetic Polypeptide
  MISC_FEATURE: Glucagon analogue
  MOD_RES (24)..(24): 2-butyrolactone bound through thiol group of Cysteine
HSQGTFTSDYSKYLDSRRAQCFVQWLMNT

SEQ ID NO: 1443 - protein, 29 aa, Artificial Sequence
  Synthetic Polypeptide
  MISC_FEATURE: Glucagon Analogue
  MOD_RES (21)..(21): Carboxymethyl group bound through thiol group of Cysteine
HSQGTFTSDYSKYLDSRRAQCFVQWLMNT

SEQ ID NO: 1444 - protein, 39 aa, Homo sapiens
HSQGTFTSDYSRYLDSRRAQDFVQWLRNTGPSSGAPPPS

SEQ ID NO: 1445 - protein, 35 aa, Artificial Sequence; identical to SEQ ID NO: 1346
  Synthetic Polypeptide
  MISC_FEATURE: Glucagon analogue
  MOD_RES (1)..(1): N-terminal amino group replaced with hydroxy group
  MISC_FEATURE (4)..(4): Xaa is aspartic acid, glutamic acid, cysteic acid or homocysteic acid
  MISC_FEATURE (7)..(11): Lactam bridge connecting residues 7 and 11
  MISC_FEATURE (10)..(10): Xaa is Asp, Glu, cysteic acid, homoglutamic acid or homocysteic acid
  MISC_FEATURE (22)..(22): Xaa is Met, Leu or Nle
  MISC_FEATURE (23)..(23): Xaa is Asn, Lys, Asp, Glu, cysteic acid and homocysteic acid
  MISC_FEATURE (24)..(24): Xaa is Thr, Asp, Glu, cysteic acid and homocysteic acid
  MISC_FEATURE (25)..(25): Xaa is Cys, Orn, homocysteine or acetyl phenyalanine
  MOD_RES (25)..(25): Pegylated

SEQ ID NO: 1446 - protein, 35 aa, Artificial Sequence; identical to SEQ ID NO: 1347
  Synthetic Polypeptide
  MISC_FEATURE: Glucagon analogue
  MOD_RES (1)..(1): N-terminal amino group replaced with hydroxy group
  MISC_FEATURE (4)..(4): Xaa is aspartic acid, glutamic acid, cysteic acid or homocysteic acid
  MISC_FEATURE (10)..(10): Xaa is Asp, Glu, cysteic acid, homoglutamic acid or homocysteic acid
  MISC_FEATURE (11)..(15): Lactam bridge connecting residues 11 and 15
  MISC_FEATURE (22)..(22): Xaa is Met, Leu or Nle
  MISC_FEATURE (23)..(23): Xaa is Asn, Lys, Asp, Glu, cysteic acid and homocysteic acid
  MISC_FEATURE (24)..(24): Xaa is Thr, Asp, Glu, cysteic acid and homocysteic acid
  MISC_FEATURE (35)..(35): Xaa is Cys, Orn, homocysteine or acetyl phenyalanine
  MOD_RES (35)..(35): Pegylated

SEQ ID NO: 1447 - protein, 24 aa, Artificial Sequence
  Synthetic Polypeptide
  MISC_FEATURE: Glucagon analogue
  MISC_FEATURE (4)..(4): Xaa is glutamic acid, homoglutamic acid, cysteic acid or homocysteic acid
  MISC_FEATURE (7)..(11): Lactam bridge connecting residues 7 and 11
  MISC_FEATURE (10)..(10): Xaa is Glu or Asp
  MISC_FEATURE (22)..(22): Xaa is Met, Leu or Nle
  MISC_FEATURE (23)..(23): Xaa is Asn, Asp or Glu
FTSXYSKYLXERRAQDFVQWLXXT

SEQ ID NO: 1448 - protein, 24 aa, Artificial Sequence
  Synthetic Polypeptide
  MISC_FEATURE: Glucagon analogue
  MISC_FEATURE (4)..(4): Xaa is glutamic acid, homoglutamic acid,  cysteic acid or homocysteic acid
  MISC_FEATURE (10)..(10): Xaa is Asp or Glu
  MISC_FEATURE (11)..(15): Lactam bridge connecting residues 11 and 15
  MISC_FEATURE (22)..(22): Xaa is Met, Leu or Nle
  MISC_FEATURE (23)..(23): Xaa is Asn, Asp or Glu
FTSXYSKYLXERRAKDFVQWLXXT

SEQ ID NO: 1449 - protein, 23 aa, Artificial Sequence
  Synthetic Polypeptide
  MISC_FEATURE: Glucagon analogue
TSDYSKYLDERRAKDFVQWLMDT

SEQ ID NO: 1450 - protein, 11 aa, Artificial Sequence
  Synthetic Polypeptide
  MISC_FEATURE: Peptide fragment representing the carboxy terminal 10 amino acids of Exendin-4 plus one additional amino acid
  MISC_FEATURE (11)..(11): Xaa is selected form the group consisting of Cys, Orn, Lys, homocysteine and acetyl phenyalanine
GPSSGAPPPSX

SEQ ID NO: 1451 - protein, 24 aa, Artificial Sequence
  Synthetic Polypeptide
  MISC_FEATURE: Glucagon analogue
  MOD_RES (1)..(1): N-terminal amino group replaced with hydroxy group
  MISC_FEATURE (4)..(4): Xaa is aspartic acid, glutamic acid, cysteic acid, homoglutamic acid or homocysteic acid
  MISC_FEATURE (7)..(7): Xaa is Lys or Glu
  MISC_FEATURE (10)..(10): Xaa is Asp, Glu, cysteic acid, homoglutamic acid or homocysteic acid
  MISC_FEATURE (11)..(11): Xaa is Ala, Ser, Glu, Lys Gln, homoglutamic acid or homocysteic acid
  MISC_FEATURE (15)..(15): Xaa is Arg, Gln, Glu or Lys
  MISC_FEATURE (19)..(19): Xaa is Ala, Gln, Lys or Glu
  MISC_FEATURE (22)..(22): Xaa is Met, Leu or Nle
  MISC_FEATURE (23)..(23): Xaa is Asn, Lys or an acidic amino acid
  MISC_FEATURE (24)..(24): Xaa is Thr, Gly or an acidic amino acid
FTSXYSXYLXXRRAXDFVXWLXXX

SEQ ID NO: 1452 - protein, 6 aa, Artificial Sequence
  Synthetic Polypeptide
  MISC_FEATURE (6)..(6): Xaa is phenyl lactic acid
HSQGTX

SEQ ID NO: 1453 - protein, 5 aa, Artificial Sequence
  Synthetic Polypeptide
  MISC_FEATURE (5)..(5): Xaa is phenyl lactic acid
SQGTX

SEQ ID NO: 1454 - protein, 4 aa, Artificial Sequence
  Synthetic Polypeptide
  MISC_FEATURE (4)..(4): Xaa is phenyl lactic acid
QGTX

SEQ ID NO: 1455 - protein, 3 aa, Artificial Sequence
  Synthetic Polypeptide
  MISC_FEATURE (3)..(3): Xaa is phenyl lactic acid
GTX

SEQ ID NO: 1456 - protein, 2 aa, Artificial Sequence
  Synthetic Polypeptide
  MISC_FEATURE (2)..(2): Xaa is phenyl lactic acid
TX

SEQ ID NO: 1457 - protein, 6 aa, Artificial Sequence
  Synthetic Polypeptide
  MISC_FEATURE (1)..(1): Xaa is selected from a group consisting of His, D-histidine, alpha, alpha-dimethyl imidiazole acetic acid (DMIA), N-methyl histidine, alpha-methyl histidine, imidazole acetic acid, desaminohistidine, hydroxyl-histidine, acetyl-histidine and
  MISC_FEATURE (2)..(2): Xaa is selected from a group consisting of Ser, D-serine, D-alanine, Val, Gly, N-methyl serine, N-methyl alanine, and aminoisobutyric acid (AIB)
  MISC_FEATURE (3)..(3): Xaa is selected from a group consisting of Glu or Gln
  MISC_FEATURE (6)..(6): Xaa is phenyl lactic acid
XXXGTX

SEQ ID NO: 1458 - protein, 5 aa, Artificial Sequence
  Synthetic Polypeptide
  MISC_FEATURE (1)..(1): Xaa is selected from a group consisting of Ser, D-serine, D-alanine, Val, Gly, N-methyl serine, N-methyl alanine, and aminoisobutyric acid (AIB)
  MISC_FEATURE (2)..(2): Xaa is selected from a group consisting of Glu or Gln
  MISC_FEATURE (5)..(5): Xaa is phenyl lactic acid
XXGTX

SEQ ID NO: 1459 - protein, 4 aa, Artificial Sequence
  Synthetic Polypeptide
  MISC_FEATURE (1)..(1): Xaa is selected from a group consisting of Glu or Gln
  MISC_FEATURE (4)..(4): Xaa is phenyl lactic acid
XGTX

SEQ ID NO: 1460 - protein, 24 aa, Artificial Sequence
  Synthetic Polypeptide
  MOD_RES (1)..(1): N-terminal amino group replaced with hydroxy group
  MISC_FEATURE (11)..(15): Lactam bridge connecting residues 11 and 15
  MOD_RES (24)..(24): C-terminal alpha carboxylate replaced with amide
FTSDYSKYLDERRAKDFVQWLMDT

SEQ ID NO: 1461 - protein, 24 aa, Artificial Sequence
  Synthetic Polypeptide
  MOD_RES (1)..(1): N-terminal amino group replaced with hydroxy group
  MOD_RES (24)..(24): C-terminal alpha carboxylate replaced with amide
FTSEYSKYLDSRRAQDFVQWLMNT

SEQ ID NO: 1462 - protein, 24 aa, Artificial Sequence
  Synthetic Polypeptide
  MOD_RES (1)..(1): N-terminal amino group replaced with hydroxy group
  MISC_FEATURE (4)..(7): Lactam bridge connecting residues 4 and 7
  MOD_RES (24)..(24): C-terminal alpha carboxylate replaced with amide
FTSEYSKYLDSRRAQDFVQWLMNT

SEQ ID NO: 1463 - protein, 28 aa, Artificial Sequence
  Synthetic Polypeptide
  MISC_FEATURE (15)..(19): Lactam bridge connecting residues 15 and 19
  MOD_RES (28)..(28): C-terminal alpha carboxylate replaced with amide
AEGTFTSEYSKYLDERRAKDFVQWLMDT

SEQ ID NO: 1464 - protein, 28 aa, Artificial Sequence
  Synthetic Polypeptide
  MISC_FEATURE (4)..(5): Threonine in position 4 and phenyl lactic acid in position 5 are linked via ester bond
  MISC_FEATURE (5)..(5): Xaa is phenyl lactic acid
  MISC_FEATURE (15)..(19): Lactam bridge connecting residues 15 and 19
  MOD_RES (28)..(28): C-terminal alpha carboxylate replaced with amide
AEGTXTSDYSKYLDERRAKDFVQWLMDT

SEQ ID NO: 1465 - protein, 28 aa, Artificial Sequence
  Synthetic Polypeptide
  MISC_FEATURE (15)..(19): Lactam bridge connecting residues 15 and 19
  MOD_RES (28)..(28): C-terminal alpha carboxylate replaced with amide
SQGTFTSEYSKYLDERRAKDFVQWLMDT

SEQ ID NO: 1466 - protein, 28 aa, Artificial Sequence
  Synthetic Polypeptide
  MISC_FEATURE (4)..(5): Threonine in position 4 and phenyl lactic acid in position 5 are linked via ester bond
  MISC_FEATURE (5)..(5): Xaa is phenyl lactic acid
  MISC_FEATURE (15)..(19): Lactam bridge connecting residues 15 and 19
  MOD_RES (28)..(28): C-terminal alpha carboxylate replaced with amide
SQGTXTSDYSKYLDERRAKDFVQWLMDT

SEQ ID NO: 1467 - protein, 24 aa, Artificial Sequence
  Synthetic Polypeptide
  MOD_RES (1)..(1): N-terminal amino group replaced with hydroxy group
  MISC_FEATURE (5)..(5): Covalently linked to a cholesterol acid moiety
  MISC_FEATURE (11)..(15): Lactam bridge connecting residues 11 to 15
  MOD_RES (24)..(24): C-terminal alpha carboxylate replaced with amide
FTSDKSKYLDERRAKDFVQWLMDT

SEQ ID NO: 1468 - protein, 25 aa, Artificial Sequence
  Synthetic Polypeptide
  MOD_RES (1)..(1): N-terminal amino group replaced with hydroxy group
  MISC_FEATURE (11)..(15): Lactam bridge connecting residues 11 and 15
  MISC_FEATURE (25)..(25): Covalently linked to a cholesterol acid moiety
  MOD_RES (25)..(25): C-terminal alpha carboxylate replaced with amide
FTSDYSKYLDERRAKDFVQWLMDTK

SEQ ID NO: 1469 - protein, 35 aa, Artificial Sequence
  Synthetic Polypeptide
  MOD_RES (1)..(1): N-terminal amino group replaced with hydroxy group
  MISC_FEATURE (11)..(15): Lactam bridge connectiong residues 11 and 15
  MISC_FEATURE (35)..(35): Covalently linked to a cholesterol acid moiety
  MOD_RES (35)..(35): C-terminal alpha carboxylate replaced with amide
FTSDYSKYLDERRAKDFVQWLMDTGPSSGAPPPSK

SEQ ID NO: 1470 - protein, 28 aa, Artificial Sequence
  Synthetic Polypeptide
  MISC_FEATURE (1)..(1): Xaa is amino isobutyric acid
  MISC_FEATURE (4)..(5): Threonine in position 4 and phenyl lactic acid in position 5 are linked via ester bond
  MISC_FEATURE (5)..(5): Xaa is phenyl lactic acid
  MISC_FEATURE (15)..(19): Lactam bridge connectiong residues 15 and 19
  MOD_RES (28)..(28): C-terminal alpha carboxylate replaced with amide
XEGTXTSDYSKYLDERRAKDFVQWLMDT

SEQ ID NO: 1471 - protein, 34 aa, Artificial Sequence; identical to SEQ ID NO: 1428
  Synthetic Polypeptide
  MOD_RES (34)..(34): C-terminal alpha carboxylate replaced with amide

SEQ ID NO: 1472 - protein, 34 aa, Artificial Sequence; identical to SEQ ID NO: 1428
  Synthetic Polypeptide
  MOD_RES (1)..(1): N-terminal amino group replaced with hydroxy group
  MOD_RES (34)..(34): C-terminal alpha carboxylate replaced with amide

SEQ ID NO: 1473 - protein, 34 aa, Artificial Sequence; identical to SEQ ID NO: 1430
  Synthetic Polypeptide
  MISC_FEATURE (11)..(15): Lactam bridge connecting residues 11 and 15
  MOD_RES (34)..(34): C-terminal alpha carboxylate replaced with amide

SEQ ID NO: 1474 - protein, 34 aa, Artificial Sequence; identical to SEQ ID NO: 1430
  Synthetic Polypeptide
  MOD_RES (1)..(1): N-terminal amino group replaced with hydroxy group
  MISC_FEATURE (11)..(15): Lactam bridge connecting residues 11 and 15
  MOD_RES (34)..(34): C-termincal alpha carboxylate replaced with amide

SEQ ID NO: 1475 - protein, 24 aa, Artificial Sequence
  Synthetic Polypeptide
  MOD_RES (1)..(1): N-terminal amino group replaced with hydroxy group
  MISC_FEATURE (7)..(11): Lactam bridge connecting residues 7 and 11
  MOD_RES (24)..(24): C-terminal alpha carboxylate replaced with amide
FTSDYSKYLDERRAQDFVQWLMDT

SEQ ID NO: 1476 - protein, 24 aa, Artificial Sequence
  Synthetic Polypeptide
  MOD_RES (1)..(1): N-terminal amino group replaced with hydroxy group
  MISC_FEATURE (11)..(15): Lactam bridge connecting residues 11 and 15
  MOD_RES (24)..(24): C-terminal alpha carboxylate replaced with amide
FTSDYSKYLDERRAKDFVQWLMDT

SEQ ID NO: 1477 - protein, 24 aa, Artificial Sequence
  Synthetic Polypeptide
  MOD_RES (1)..(1): N-terminal amino group replaced with hydroxy group
  MISC_FEATURE (15)..(19): Lactam bridge connecting residues 15 and 19
  MOD_RES (24)..(24): C-terminal alpha carboxylate replaced with amide
FTSDYSKYLDERRAKDFVEWLMDT

SEQ ID NO: 1478 - protein, 24 aa, Artificial Sequence
  Synthetic Polypeptide
  MOD_RES (1)..(1): N-terminal amino group replaced with hydroxy group
  MISC_FEATURE (19)..(23): Lactam bridge connecting residues 19 and 23
  MOD_RES (24)..(24): C-terminal alpha carboxylate replaced with amide
FTSDYSKYLDERRAQDFVEWLMKT

SEQ ID NO: 1479 - protein, 24 aa, Artificial Sequence
  Synthetic Polypeptide
  MOD_RES (1)..(1): N-terminal amino group replaced with hydroxy group
  MISC_FEATURE (7)..(11): Lactam bridge connecting residues 7 and 11
  MOD_RES (24)..(24): C-terminal alpha carboxylate replaced with amide
FTSDYSKYLDEQAAKDFIAWLMDT

SEQ ID NO: 1480 - protein, 24 aa, Artificial Sequence
  Synthetic Polypeptide
  MOD_RES (1)..(1): N-terminal amino group replaced with hydroxy group
  MISC_FEATURE (11)..(15): Lactam bridge connecting residues 11 and 15
  MOD_RES (24)..(24): C-terminal alpha carboxylate replaced with amide
FTSDYSKYLDEQAAKEFIAWLMDT

SEQ ID NO: 1481 - protein, 28 aa, Artificial Sequence
  Synthetic Polypeptide
  MISC_FEATURE (15)..(19): Lactam bridge connecting residues 15 and 19
  MOD_RES (28)..(28): C-terminal alpha carboxylate replaced with amide
AEGTFTSEYSKYLDERRAKDFVQWLMDT

SEQ ID NO: 1482 - protein, 28 aa, Artificial Sequence
  Synthetic Polypeptide
  MISC_FEATURE (15)..(19): Lactam bridge connecting residues 15 and 19
  MOD_RES (28)..(28): C-terminal alpha carboxylate replaced with amide
AEGTFTSEYSKYLDEQAAKEFIAWLMDT

SEQ ID NO: 1483 - protein, 29 aa, Artificial Sequence
  Synthetic Polypeptide
  MISC_FEATURE (16)..(20): Lactam bridge connection residues 16 and 20
  MOD_RES (29)..(29): C-terminal alpha carboxylate replaced with amide
HAEGTFTSEYSKYLDERRAKDFVQWLMDT

SEQ ID NO: 1484 - protein, 29 aa, Artificial Sequence
  Synthetic Polypeptide
  MISC_FEATURE (16)..(20): Lactam bridge connecting bridges 16 and 20
  MOD_RES (29)..(29): C-terminal alpha carboxylate replaced with amide
HAEGTFTSEYSKYLDEQAAKEFIAWLMDT

SEQ ID NO: 1485 - protein, 26 aa, Artificial Sequence
  Synthetic Polypeptide
  MISC_FEATURE (13)..(17): Lactam bridge connecting residues 13 and 17
  MOD_RES (26)..(26): C-terminal alpha carboxylate replaced with amide
GTFTSEYSKYLDERRAKDFVQWLMDT

SEQ ID NO: 1486 - protein, 28 aa, Artificial Sequence
  Synthetic Polypeptide
  MISC_FEATURE (5)..(6): Threonine in position 5 and phenyl lactic acid in position 6 linked via ester bond
  MISC_FEATURE (15)..(19): Lactam bridge connecting residues 15 and 19
  MOD_RES (28)..(28): C-terminal alpha carboxylate replaced with amide
SQGTFTSEYSKYLDERRAKDFVQWLMDT

SEQ ID NO: 1487 - protein, 29 aa, Artificial Sequence
  Synthetic Polypeptide
  MISC_FEATURE (5)..(6): Threonine at position 5 and phenyl lactic acid at position 6 linked via ester bond
  MISC_FEATURE (6)..(6): Xaa is phenyl lactic acid
  MISC_FEATURE (16)..(20): Lactam bridge connecting residues 16 and 20
  MOD_RES (29)..(29): C-terminal alpha carboxylate replaced with amide
HAEGTXTSDYSKYLDERRAKDFVQWLMDT

SEQ ID NO: 1488 - protein, 24 aa, Artificial Sequence
  Synthetic Polypeptide
  MOD_RES (1)..(1): N-terminal amino group replaced with hydroxy group
  MISC_FEATURE (7)..(11): Lactam bridge connecting residues 7 and 11
  MOD_RES (19)..(19): Pegylated
  MOD_RES (24)..(24): C-terminal alpha carboxylate replaced with amide
FTSDYSKYLDERRAQDFVCWLMDT

SEQ ID NO: 1489 - protein, 35 aa, Artificial Sequence
  Synthetic Polypeptide
  MOD_RES (1)..(1): N-terminal amino group replaced with hydroxy group
  MISC_FEATURE (7)..(11): Lactam bridge connecting residues 7 and 11
  MOD_RES (35)..(35): Pegylated
  MOD_RES (35)..(35): C-terminal alpha carboxylate replaced with amide
FTSDYSKYLDERRAQDFVQWLMDTGPSSGAPPPSC

SEQ ID NO: 1490 - protein, 24 aa, Artificial Sequence
  Synthetic Polypeptide
  MOD_RES (1)..(1): N-terminal amino group replaced with hydroxy group
  MISC_FEATURE (11)..(15): Lactam bridge connecting residues 11 and 15
  MOD_RES (19)..(19): Pegylated
  MOD_RES (24)..(24): C-terminal alpha carboxylate replaced with amide
FTSDYSKYLDERRAKDFVCWLMDT

SEQ ID NO: 1491 - protein, 35 aa, Artificial Sequence
  Synthetic Polypeptide
  MOD_RES (1)..(1): N-terminal amino group replaced with hydroxy group
  MISC_FEATURE (11)..(15): Lactam bridge connecting residues 11 and 15
  MOD_RES (35)..(35): Pegylated
  MOD_RES (35)..(35): C-terminal alpha carboxylate replaced with amide
FTSDYSKYLDERRAKDFVQWLMDTGPSSGAPPPSC

SEQ ID NO: 1492 - protein, 24 aa, Artificial Sequence
  Synthetic Polypeptide
  MOD_RES (1)..(1): N-terminal amino group replaced with hydroxy group
  MOD_RES (1)..(1): Covalently attached to a C16 fatty acid
  MISC_FEATURE (11)..(15): Lactam bridge connection residues 11 and 15
  MOD_RES (24)..(24): C-terminal alpha carboxylate replaced with amide
FTSDYSKYLDERRAKDFVQWLMDT

SEQ ID NO: 1493 - protein, 24 aa, Artificial Sequence
  Synthetic Polypeptide
  MOD_RES (1)..(1): N-terminal amino group replaced with hydroxy group
  MOD_RES (5)..(5): Linked to a C16 fatty acid via Glu residue
  MISC_FEATURE (11)..(15): Lactam bridge connecting residues 11 and 15
  MISC_FEATURE (15)..(15): Linked to a C16 fatty acid via Glu residue
  MOD_RES (24)..(24): C-terminal alpha carboxylate replaced with amide
FTSDKSKYLDERRAKDFVQWLMDT

SEQ ID NO: 1494 - protein, 24 aa, Artificial Sequence
  Synthetic Polypeptide
  MOD_RES (1)..(1): N-terminal amino group replaced with hydroxy group
  MISC_FEATURE (15)..(15): Linked to C16 fatty acid via Glu residue
  MOD_RES (24)..(24): C-terminal alpha carboxylate replaced with amide
FTSDYSKYLDERRAKDFVQWLMDT

SEQ ID NO: 1495 - protein, 24 aa, Artificial Sequence
  Synthetic Polypeptide
  MOD_RES (1)..(1): N-terminal amino group replaced with hydroxy group
  MISC_FEATURE (11)..(15): Lactam bridge connecting residues 11 and 15
  MISC_FEATURE (19)..(19): Linked to a C16 fatty acid via Glu residue
  MOD_RES (24)..(24): C-terminal alpha carboxylate replaced with amide
FTSDYSKYLDERRAKDFVKWLMDT

SEQ ID NO: 1496 - protein, 24 aa, Artificial Sequence
  Synthetic Polypeptide
  MOD_RES (1)..(1): N-terminal amino group replaced with hydroxy group
  MISC_FEATURE (11)..(15): Lactam bridge connecting residues 11 and 15
  MISC_FEATURE (24)..(24): Linked to a C16 fatty acid via Glu residue
  MOD_RES (24)..(24): C-terminal alpha carboxylate replaced with amide
FTSDYSKYLDERRAKDFVQWLMDK

SEQ ID NO: 1497 - protein, 24 aa, Artificial Sequence
  Synthetic Polypeptide
  MOD_RES (1)..(1): N-terminal amino group replaced with hydroxy group
  MISC_FEATURE (11)..(11): Xaa is amino isobutyric acid
  MOD_RES (24)..(24): C-terminal alpha carboxylate replaced with amide
FTSDYSKYLDXRRAQDFVQWLMNT

SEQ ID NO: 1498 - protein, 24 aa, Artificial Sequence
  Synthetic Polypeptide
  MOD_RES (1)..(1): N-terminal amino group replaced with hydroxy group
  MISC_FEATURE (11)..(11)
  MISC_FEATURE (15)..(15): Xaa is alpha isobutyric acid
  MOD_RES (24)..(24): C-terminal alpha carboxylate replaced with amide
FTSDKSKYLDXRRAXDFVCWLMNT

SEQ ID NO: 1499 - protein, 24 aa, Artificial Sequence
  Synthetic Polypeptide
  MOD_RES (1)..(1): N-terminal amino group replaced with hydroxy group
  MOD_RES (24)..(24): C-terminal alpha carboxylate replaced with amide
FTSDYSKYLDERRAQDFVQWLMNT

SEQ ID NO: 1500 - protein, 24 aa, Artificial Sequence
  Synthetic Polypeptide
  MOD_RES (1)..(1): N-terminal amino group replaced with hydroxy group
  MOD_RES (24)..(24): C-terminal alpha carboxylate replaced with amide
FTSDKSKYLDERRAQDFVCWLMNT

SEQ ID NO: 1501 - protein, 24 aa, Artificial Sequence
  Synthetic Polypeptide
  MISC_FEATURE (4)..(7): Lactam bridge connecting residues 4 and 7
  MOD_RES (11)..(11): Xaa is alpha isobutyric acid
  MOD_RES (24)..(24): C-terminal carboxylate replaced with amide
FTSEYSKYLDXRRAQDFVQWLMNT

SEQ ID NO: 1502 - protein, 24 aa, Artificial Sequence
  Synthetic Polypeptide
  MISC_FEATURE (4)..(7): Lactam bridge connecting residues 4 and 7
  MOD_RES (11)..(11): Xaa is alpha isobutyric acid
  MOD_RES (24)..(24): C-terminal carboxylate replaced with amide
FTSEYSKYLDXRRAQDFVQWLMNT

SEQ ID NO: 1503 - protein, 24 aa, Artificial Sequence
  Synthetic Polypeptide
  MOD_RES (1)..(1): N-terminal amino group replaced with hydroxy group
  MISC_FEATURE (11)..(15): Lactam bridge connecting residues 11 and 15
  MOD_RES (24)..(24): C-terminal alpha carboxylate replaced with amide
FTSDYSKYLDERRAKEFVQWLMDT

SEQ ID NO: 1504 - protein, 24 aa, Artificial Sequence
  Synthetic Polypeptide
  MOD_RES (1)..(1): N-terminal amino group replaced with hydroxy group
  MOD_RES (24)..(24): C-terminal alpha carboxylate replaced with amide
FTSDYSKYLDEQAAKEFIAWLMNT

SEQ ID NO: 1505 - protein, 34 aa, Artificial Sequence; identical to SEQ ID NO: 1430
  Synthetic Polypeptide
  MOD_RES (34)..(34): C-terminal alpha carboxylate replaced with amide

SEQ ID NO: 1506 - protein, 24 aa, Artificial Sequence
  Synthetic Polypeptide
  MOD_RES (1)..(1): N-terminal amino group replaced with hydroxy group
  MISC_FEATURE (5)..(5): Linked to a C16 fatty acid via Glu residue
  MISC_FEATURE (7)..(7): Linked to a C16 fatty acid via Glu residue
  MOD_RES (24)..(24): C-terminal carboxylate replaced with amide
FTSDKSKYLDERRAKDFVQWLMDT

SEQ ID NO: 1507 - protein, 6 aa, Artificial Sequence
  Synthetic Polypeptide
  MISC_FEATURE (1)..(1): Xaa1 is selected from a group consisting of His, D-histidine, alpha, alpha-dimethyl imidiazole acetic acid (DMIA), N-methyl histidine, alpha-methyl histidine, imidazole acetic acid, desaminohistidine, hydroxyl-histidine, acetyl-histidine and
  MISC_FEATURE (2)..(2): Xaa is selected from a group consisting of Ser, D-serine, D-alanine, valine, glycine, N-methyl serine, and aminoisobutyric acid (AIB)
  MISC_FEATURE (3)..(3): Xaa is selected from a group consisting of Glu or Gln
XXXTGF

SEQ ID NO: 1508 - protein, 5 aa, Artificial Sequence
  Synthetic Polypeptide
  MISC_FEATURE (1)..(1): Xaa is selected from a group consisting of Ser, D-serine, D-alanine, valine, glycine, N-methyl serine, and aminoisobutyric acid (AIB)
  MISC_FEATURE (2)..(2): Xaa is selected from a group consisting of Glu or Gln
XXTGF

SEQ ID NO: 1509 - protein, 4 aa, Artificial Sequence
  Synthetic Polypeptide
  MISC_FEATURE (1)..(1): Xaa is selected from a group consisting of Glu or Gln
XTGF

SEQ ID NO: 1510 - protein, 24 aa, Artificial Sequence
  Synthetic Polypeptide
  MOD_RES (1)..(1): N-terminal amino group replaced with hydroxy group
  MOD_RES (24)..(24): C-terminal alpha carboxylate replaced with amide
FTSDYSKYLDSRRAQDFVQWLMDT

SEQ ID NO: 1511 - protein, 28 aa, Artificial Sequence
  Synthetic Polypeptide
  MOD_RES (28)..(28): C-terminal alpha carboxylate replaced with amide
SQGTFTSEYSKYLDSRRAQDFVQWLMNT

SEQ ID NO: 1512 - protein, 28 aa, Artificial Sequence
  Synthetic Polypeptide
  MISC_FEATURE (4)..(5): Threonine at position 4 and phenyl lactic acid at position 5 linked via ester bond
  MISC_FEATURE (5)..(5): Xaa is phenyl lactic acid
  MOD_RES (28)..(28): C-terminal alpha carboxylate replaced with amide
SQGTXTSEYSKYLDSRRAQDFVQWLMNT

SEQ ID NO: 1513 - protein, 29 aa, Artificial Sequence
  Synthetic Polypeptide
  MISC_FEATURE (5)..(6): Threorine at position 5 and phenyl lactic acid at position 6 linked via ester bond
  MISC_FEATURE (6)..(6): Xaa is phenyl lactic acid
  MOD_RES (29)..(29): C-terminal alpha carboxylate replaced with amide
HSQGTXTSEYSKYLDSRRAQDFVQWLMNT

SEQ ID NO: 1514 - protein, 24 aa, Artificial Sequence
  Synthetic Polypeptide
  MOD_RES (1)..(1): N-terminal amino group replaced with hydroxy group
  MISC_FEATURE (11)..(15): Lactam bridge connecting residues 11 and 15
  MOD_RES (19)..(19): Pegylated
  MOD_RES (24)..(24): C-terminal alpha carboxylate replaced with amide
FTSEYSKYLDERRAKDFVCWLMNT

SEQ ID NO: 1515 - protein, 24 aa, Artificial Sequence
  Synthetic Polypeptide
  MOD_RES (1)..(1): N-terminal amino group replaced with hydroxy group
  MISC_FEATURE (11)..(15): Lactam bridge connecting residues 11 and 15
  MISC_FEATURE (19)..(19): Pegylated via spacer
  MOD_RES (24)..(24): C-terminal alpha carboxylate replaced with amide
FTSDYSKYLDERRAKDFVKWLMDT

SEQ ID NO: 1516 - protein, 24 aa, Artificial Sequence
  Synthetic Polypeptide
  MOD_RES (1)..(1): N-terminal amino group replaced with hydroxy group
  MISC_FEATURE (11)..(15): Lactam bridge connecting residues 11 and 15
  MOD_RES (19)..(19): Pegylated via rigid spacer
  MOD_RES (24)..(24): C-terminal alpha carboxylate replaced with amide
FTSDYSKYLDERRAKDFVKWLMDT

SEQ ID NO: 1517 - protein, 35 aa, Artificial Sequence
  Synthetic Polypeptide
  MISC_FEATURE (1)..(1): N-terminal amino group replaced with hydroxy group
  MISC_FEATURE (11)..(15): Lactam bridge connecting residues 11 and 15
  MOD_RES (35)..(35): Pegylated
  MOD_RES (35)..(35): C-terminal alpha carboxylate replaced with amide
FTSDYSKYLDERRAKDFVQWLMDTGPGPGPGPGPC

SEQ ID NO: 1518 - protein, 35 aa, Artificial Sequence
  Synthetic Polypeptide
  MOD_RES (1)..(1): N-terminal amino group replaced with hydroxy group
  MISC_FEATURE (11)..(15): Lactam bridge connecting residues 11 and 15
  MOD_RES (35)..(35): Pegylated
  MOD_RES (35)..(35): C-terminal alpha carboxylate reaplaced with amide
FTSDYSKYLDERRAKDFVQWLMDGGPSSGAPPPSC

SEQ ID NO: 1519-1700 - skipped (182 entries)

SEQ ID NO: 1701 - protein, 29 aa, Artificial Sequence
  Synthetic peptide
  MOD_RES (2)..(2): Xaa is AIB
  misc_feature (16)..(16): Xaa can be any naturally occurring amino acid
  misc_feature (20)..(20): Xaa can be any naturally occurring amino acid
  MOD_RES (29)..(29): C-terminal amidation
HSQGTFTSDYSKYLDXQAAXGFIAWLMNT

SEQ ID NO: 1702 - protein, 29 aa, Artificial Sequence
  Synthetic peptide
  MOD_RES (2)..(2): Xaa is AIB
  MOD_RES (10)..(10): Acylated with C16 fatty acyl group
  MOD_RES (16)..(16): Xaa is AIB
  MOD_RES (29)..(29): C-terminal amidation
HXQGTFTSDKSKYLDXRAAQDFVQWLMDT

SEQ ID NO: 1703 - protein, 29 aa, Artificial Sequence
  Synthetic peptide
  MOD_RES (2)..(2): Xaa is AIB
  MOD_RES (10)..(10): Acylated with C14 fatty acyl group via dipeptide spacer
  MOD_RES (16)..(16): Xaa is AIB
  MOD_RES (29)..(29): C-terminal amidation
HXQGTFTSDKSKYLDXRAAQDFVQWLMDT

SEQ ID NO: 1704 - protein, 29 aa, Artificial Sequence
  Synthetic peptide
  MOD_RES (2)..(2): Xaa is AIB
  MOD_RES (10)..(10): Acylated with C18 fatty acyl group via dipeptide spacer
  MOD_RES (16)..(16): Xaa is AIB
  MOD_RES (29)..(29): C-terminal amidation
HXQGTFTSDKSKYLDXRAAQDFVQWLMDT

SEQ ID NO: 1705 - protein, 29 aa, Artificial Sequence
  Synthetic peptide
  MOD_RES (1)..(10): Acylated with C16 fatty acyl group via dipeptide spacer
  MOD_RES (2)..(2): Xaa is AIB
  MOD_RES (16)..(16): Xaa is AIB
  MOD_RES (29)..(29): C-terminal amidation
HXEGTFTSDKSKYLDXRAAQDFVQWLMDT

SEQ ID NO: 1706 - protein, 29 aa, Artificial Sequence
  Synthetic peptide
  MOD_RES (2)..(2): Xaa is AIB
  MOD_RES (10)..(10): Acylated with C16 fatty acyl group via dipeptide spacer
  MOD_RES (16)..(16): Xaa is AIB
HXQGTFISDKSKYLDXRAAQDFVQWLMDT

SEQ ID NO: 1707 - protein, 29 aa, Artificial Sequence
  Synthetic peptide
  MOD_RES (2)..(2): Xaa is AIB
  MOD_RES (10)..(10): Acylated with C16 fatty acyl group via dipeptide spacer
  MOD_RES (29)..(29): C-terminal amidation
HXQGTFTSDKSKYLDERAAQDFVQWLMDT

SEQ ID NO: 1708 - protein, 29 aa, Artificial Sequence
  Synthetic peptide
  MOD_RES (2)..(2): Xaa is AIB
  MOD_RES (10)..(10): Acylated with C16 fatty acyl group via dipeptide spacer
  MOD_RES (16)..(16): Xaa is AIB
  MOD_RES (29)..(29): C-terminal amidation
HXQGTFTSDKSKYLEXRAAQDFVQWLMDT

SEQ ID NO: 1709 - protein, 29 aa, Artificial Sequence
  Synthetic peptide
  MOD_RES (2)..(2): d-Ser
  MOD_RES (10)..(10): Acylated with C16 fatty acyl group via dipeptide spacer
  MOD_RES (16)..(16): Xaa is AIB
  MOD_RES (29)..(29): C-terminal amidation
HSQGTFTSDKSKYLDXRAAQDFVQWLMDT

SEQ ID NO: 1710 - protein, 29 aa, Artificial Sequence
  Synthetic peptide
  MOD_RES (2)..(2): Xaa is AIB
  MOD_RES (10)..(10): Acylated with C16 fatty acyl group via dipeptide spacer
  MOD_RES (16)..(16): Xaa is AIB
  MOD_RES (29)..(29): C-terminal amidation
HXQGTFTSDKSKYLDXRAAQDFVQWLLDT

SEQ ID NO: 1711 - protein, 29 aa, Artificial Sequence
  Synthetic peptide
  MOD_RES (2)..(2): Xaa is AIB
  MOD_RES (10)..(10): Acylated with C16 fatty acyl group via dipeptide spacer
  MOD_RES (29)..(29): C-terminal amidation
HXQGTFTSDKSKYLDEQAAKEFIAWLLDT

SEQ ID NO: 1712 - protein, 29 aa, Artificial Sequence
  Synthetic peptide
  MOD_RES (2)..(2): Xaa is AIB
  MOD_RES (10)..(10): Acylated with C16 fatty acyl group via gamma-Glu spacer
  MOD_RES (29)..(29): C-terminal amidation
HXQGTFTSDKSKYLDEQAAKEFICWLLDT

SEQ ID NO: 1713 - protein, 29 aa, Artificial Sequence
  Synthetic peptide
  MOD_RES (2)..(2): Xaa is AIB
  MOD_RES (10)..(10): Acylated with C16 fatty acyl group via gamma-Glu spacer
  MOD_RES (24)..(24): PEGYLATION
  MOD_RES (29)..(29): C-terminal amidation
HXQGTFTSDKSKYLDEQAAKEFICWLLDT

SEQ ID NO: 1714 - protein, 29 aa, Artificial Sequence
  Synthetic peptide
  MOD_RES (2)..(2): Xaa is AIB
  MOD_RES (10)..(10): Acylated with C16 fatty acyl group via gamma-Glu spacer
  MOD_RES (24)..(24): PEGYLATION
  MOD_RES (29)..(29): C-terminal amidation
HXQGTFTSDKSKYLDERAAQDFVCWLLDT

SEQ ID NO: 1715 - protein, 30 aa, Artificial Sequence
  Synthetic peptide
  MOD_RES (2)..(2): Xaa is AIB
  MOD_RES (10)..(10): Acylated with C16 fatty acyl group via gamma-Glu spacer
  MOD_RES (30)..(30): PEGYLATION
  MOD_RES (30)..(30): C-terminal amidation
HXQGTFTSDKSKYLDEQAAKEFIQWLLDTC

SEQ ID NO: 1716 - protein, 29 aa, Artificial Sequence
  Synthetic peptide
  MOD_RES (10)..(10): Acylated with C16 fatty acyl group via gamma-Glu spacer
  MOD_RES (24)..(24): PEGYLATION
  MOD_RES (29)..(29): C-terminal amidation
HAQGTFTSDKSKYLDERAAQDFVCWLLDT

SEQ ID NO: 1717 - protein, 29 aa, Artificial Sequence
  Synthetic peptide
  MOD_RES (2)..(2): d-Ser
  MOD_RES (10)..(10): Acylated with C16 fatty acyl group via gamma-Glu spacer
  MOD_RES (29)..(29): C-terminal amidation
HSQGTFTSDKSKYLDEQAAKEFICWLLDT

SEQ ID NO: 1718 - protein, 29 aa, Artificial Sequence
  Synthetic peptide
  MOD_RES (2)..(2): d-Ser
  MOD_RES (10)..(10): Acylated with C16 fatty acyl group via gamma-Glu spacer
  MOD_RES (29)..(29): C-terminal amidation
HSQGTFTSDKSKYLDERAAQDFVQWLLDT

SEQ ID NO: 1719 - protein, 29 aa, Artificial Sequence
  Synthetic peptide
  MOD_RES (2)..(2): d-Ser
  MOD_RES (10)..(10): Acylated with C16 fatty acyl group via gamma-Glu spacer
  MOD_RES (29)..(29): C-terminal amidation
HSQGTFTSDKSKYLDERAAQDFVCWLLDT

SEQ ID NO: 1720 - protein, 29 aa, Artificial Sequence
  Synthetic peptide
  MOD_RES (2)..(2): d-Ser
  MOD_RES (10)..(10): Acylated with C16 fatty acyl group via gamma-Glu spacer
HSQGTFTSDKSKYLDEQAAKEFICWLLDT

SEQ ID NO: 1721 - protein, 31 aa, Artificial Sequence
  Synthetic peptide
  MOD_RES (2)..(2): d-Ser
  MOD_RES (10)..(10): Acylated with C16 fatty acyl group via gamma-Glu spacer
  MOD_RES (31)..(31): C-terminal amidation
HSQGTFTSDKSKYLDEQAAKEFICWLLDTGE

SEQ ID NO: 1722 - protein, 31 aa, Artificial Sequence
  Synthetic peptide
  MOD_RES (2)..(2): d-Ser
  MOD_RES (10)..(10): Acylated with C16 fatty acyl group via gamma-Glu spacer
  MOD_RES (24)..(24): PEGYLATION
HSQGTFTSDKSKYLDEQAAKEFICWLLDTGG

SEQ ID NO: 1723 - protein, 29 aa, Artificial Sequence
  Synthetic peptide
  MOD_RES (2)..(2): d-Ser
  MOD_RES (10)..(10): Acylated with C16 fatty acyl group via gamma-Glu spacer
  MOD_RES (24)..(24): PEGYLATION
  MOD_RES (29)..(29): C-terminal amidation
HSQGTFTSDKSKYLDERAAQDFVCWLLDT

SEQ ID NO: 1724 - protein, 30 aa, Artificial Sequence
  Synthetic peptide
  MOD_RES (2)..(2): d-Ser
  MOD_RES (10)..(10): Acylated with C16 fatty acyl group via gamma-Glu spacer
  MOD_RES (30)..(30): PEGYLATION
  MOD_RES (30)..(30): C-terminal amidation
HSQGTFTSDKSKYLDERAAQDFVQWLLDTC

SEQ ID NO: 1725 - protein, 30 aa, Artificial Sequence
  Synthetic peptide
  MOD_RES (2)..(2): d-Ser
  MOD_RES (10)..(10): Acylated with C16 fatty acyl group via gamma-Glu spacer
  MOD_RES (24)..(24): PEGYLATION
  MOD_RES (30)..(30): C-terminal amidation
HSQGTFTSDYSKYLDSRRAQDFVQWLMNTE

SEQ ID NO: 1726 - protein, 30 aa, Artificial Sequence
  Synthetic peptide
  MOD_RES (2)..(2): d-Ser
  MOD_RES (10)..(10): Acylated with C16 fatty acyl group via gamma-Glu spacer
  MOD_RES (24)..(24): PEGYLATION
HSQGTFTSDKSKYLDEQAAKEFICWLLDTC

SEQ ID NO: 1727 - protein, 29 aa, Artificial Sequence
  Synthetic peptide
  MOD_RES (1)..(1): Xaa is DMIA
  MOD_RES (10)..(10): Acylated with C16 fatty acyl group via gamma-Glu spacer
  MOD_RES (29)..(29): C-terminal amidation
XSQGTFTSDKSKYLDEQAAKEFICWLLDT

SEQ ID NO: 1728 - protein, 29 aa, Artificial Sequence
  Synthetic peptide
  MOD_RES (1)..(1): des-amino-His
  MOD_RES (10)..(10): Acylated with C16 fatty acyl group via gamma-Glu spacer
  MOD_RES (29)..(29): C-terminal amidation
HSQGTFTSDKSKYLDEQAAKEFICWLLDT

SEQ ID NO: 1729 - protein, 29 aa, Artificial Sequence
  Synthetic peptide
  MOD_RES (1)..(1): Ac-His
  MOD_RES (10)..(10): Acylated with C16 fatty acyl group via gamma-Glu spacer
  MOD_RES (24)..(24): PEGYLATION
  MOD_RES (29)..(29): C-terminal amidation
HSQGTFTSDKSKYLDEQAAKEFICWLLDT

SEQ ID NO: 1730 - protein, 29 aa, Artificial Sequence
  Synthetic peptide
  MOD_RES (2)..(2): Xaa is AIB
  MOD_RES (10)..(10): Acylated with C16 fatty acyl group via gamma-Glu spacer
  MOD_RES (29)..(29): C-terminal amidation
HXQGTFTSDKSKYLDEEAVRLFIEWLMNT

SEQ ID NO: 1731 - protein, 29 aa, Artificial Sequence
  Synthetic peptide
  MOD_RES (2)..(2): Xaa is AIB
  MOD_RES (10)..(10): Acylated with C16 fatty acyl group
  MOD_RES (29)..(29): C-terminal amidation
HXQGTFTSDKSKYLDEEAVRLFIEWLMNT

SEQ ID NO: 1732 - protein, 29 aa, Artificial Sequence
  Synthetic peptide
  MOD_RES (2)..(2): Xaa is AIB
  MOD_RES (24)..(24): PEGYLATION
  MOD_RES (29)..(29): C-terminal amidation
HXQGTFTSDYSKYLDEEAVRLFICWLMNT

SEQ ID NO: 1733 - protein, 29 aa, Artificial Sequence
  Synthetic peptide
  MOD_RES (2)..(2): Xaa is AIB
  MOD_RES (29)..(29): C-terminal amidation
HXQGTFTSDYSKYLDEEAVRLFIEWLMNT

SEQ ID NO: 1734 - protein, 29 aa, Artificial Sequence
  Synthetic peptide
  MOD_RES (2)..(2): Xaa is AIB
  MOD_RES (29)..(29): C-terminal amidation
HXQGTFTSDYSKYLDEEAVRLFICWLMNT

SEQ ID NO: 1735 - protein, 29 aa, Artificial Sequence
  Synthetic peptide
  MOD_RES (2)..(2): d-Ser
  MOD_RES (24)..(24): PEGYLATION
  MOD_RES (29)..(29): C-terminal amidation
HSQGTFTSDYSKYLDEEAVRLFICWLMNT

SEQ ID NO: 1736 - protein, 29 aa, Artificial Sequence
  Synthetic peptide
  MOD_RES (2)..(2): d-Ser
  MOD_RES (29)..(29): C-terminal amidation
HSQGTFTSDYSKYLDEEAVRLFIEWLMNT

SEQ ID NO: 1737 - protein, 29 aa, Artificial Sequence
  Synthetic peptide
  MOD_RES (2)..(2): d-Ser
  MOD_RES (29)..(29): C-terminal amidation
HSQGTFTSDYSKYLDEEAVRLFICWLMNT

SEQ ID NO: 1738 - protein, 29 aa, Artificial Sequence
  Synthetic peptide
  MOD_RES (10)..(10): Acylated with C16 fatty acyl group via acidic amino acid spacer
  MOD_RES (29)..(29): C-terminal amidation
HSQGTFTSDKSKYLDEEAVRLFIEWLMNT

SEQ ID NO: 1739 - protein, 29 aa, Artificial Sequence
  Synthetic peptide
  MOD_RES (10)..(10): Acylated with C16 fatty acyl group via gamma-Glu spacer
  MOD_RES (29)..(29): C-terminal amidation
HSQGTFTSDKSKYLDEEAVRLFIEWLMNT

SEQ ID NO: 1740 - protein, 29 aa, Artificial Sequence
  Synthetic peptide
  MOD_RES (2)..(2): Xaa is AIB
  MISC_FEATURE (16)..(20): Salt bridge
  MISC_FEATURE (17)..(21): Salt bridge
  MOD_RES (24)..(24): PEGYLATION
  MOD_RES (29)..(29): C-terminal amidation
HXQGTFTSDYSKYLDEKRAKEFVCWLMNT

SEQ ID NO: 1741 - protein, 29 aa, Artificial Sequence
  Synthetic peptide
  MOD_RES (2)..(2): Xaa is AIB
  MOD_RES (16)..(16): Xaa is AIB
  MISC_FEATURE (16)..(20): Salt bridge
  MISC_FEATURE (17)..(21): Salt bridge
  MOD_RES (24)..(24): PEGYLATION
  MOD_RES (29)..(29): C-terminal amidation
HXQGTFTSDYSKYLDXKRAKEFVCWLMNT

SEQ ID NO: 1742 - protein, 29 aa, Artificial Sequence
  Synthetic peptide
  MOD_RES (2)..(2): d-Ser
  MISC_FEATURE (16)..(20): Salt bridge
  MISC_FEATURE (17)..(21): Salt bridge
  MOD_RES (24)..(24): PEGYLATION
  MOD_RES (29)..(29): C-terminal amidation
HSQGTFTSDYSKYLDEKRAKEFVCWLMNT

SEQ ID NO: 1743 - protein, 29 aa, Artificial Sequence
  Synthetic peptide
  MOD_RES (2)..(2): d-Ser
  MOD_RES (16)..(16): Xaa is AIB
  MISC_FEATURE (16)..(20): Salt bridge
  MISC_FEATURE (17)..(21): Salt bridge
  MOD_RES (24)..(24): PEGYLATION
  MOD_RES (29)..(29): C-terminal amidation
HSQGTFTSDYSKYLDXKRAKEFVCWLMNT

SEQ ID NO: 1744 - protein, 29 aa, Artificial Sequence
  Synthetic peptide
  MOD_RES (2)..(2): d-Ser
  MISC_FEATURE (16)..(20): Salt bridge
  MISC_FEATURE (17)..(21): Salt bridge
  MOD_RES (29)..(29): C-terminal amidation
HSQGTFTSDYSKYLDEKRAKEFVQWLMNT

SEQ ID NO: 1745 - protein, 29 aa, Artificial Sequence
  Synthetic peptide
  MOD_RES (2)..(2): D-serine, D-alanine, valine, amino n-butyric acid, glycine, N-methyl serine, aminoisobutyric acid
  MOD_RES (16)..(16): Xaa is AIB
  MISC_FEATURE (16)..(20): Salt bridge
  MISC_FEATURE (17)..(21): Salt bridge
  MOD_RES (29)..(29): C-terminal amidation
HSQGTFTSDYSKYLDXKRAKEFVQWLMNT

SEQ ID NO: 1746 - protein, 29 aa, Artificial Sequence
  Synthetic peptide
  MOD_RES (2)..(2): D-serine, D-alanine, valine, amino n-butyric acid, glycine, N-methyl serine, aminoisobutyric acid
  MOD_RES (10)..(10): Acylated with C16 fatty acyl group via gamma-Glu spacer
  MISC_FEATURE (15)..(20): Salt bridge
  MOD_RES (16)..(16): Xaa is AIB
  MISC_FEATURE (16)..(21): Salt bridge
  MOD_RES (29)..(29): C-terminal amidation
HSQGTFTSDKSKYLDXKRAKEFVQWLMNT

SEQ ID NO: 1747 - protein, 29 aa, Artificial Sequence
  Synthetic peptide
  MOD_RES (1)..(1): Xaa is DMIA
  MOD_RES (16)..(16): Xaa is AIB
  MISC_FEATURE (16)..(20): Salt bridge
  MISC_FEATURE (17)..(21): Salt bridge
  MOD_RES (24)..(24): PEGYLATION
  MOD_RES (29)..(29): C-terminal amidation
XSQGTFTSDYSKYLDXKRAKEFVCWLMNT

SEQ ID NO: 1748 - protein, 29 aa, Artificial Sequence
  Synthetic peptide
  MISC_FEATURE (16)..(20): Salt bridge
  MISC_FEATURE (17)..(21): Salt bridge
  MOD_RES (29)..(29): C-terminal amidation
HSQGTFTSDYSKYLDEKRAKEFVQWLMNT

SEQ ID NO: 1749 - protein, 29 aa, Artificial Sequence
  Synthetic peptide
  MOD_RES (2)..(2): D-serine, D-alanine, valine, amino n-butyric acid, glycine, N-methyl serine, aminoisobutyric acid
  MOD_RES (10)..(10): Acylated with C16 fatty acyl group via dipeptide spacer
  MOD_RES (16)..(16): Xaa is AIB
  MOD_RES (29)..(29): C-terminal amidation
HXQGTFTSDKSKYLDXRAAQDFVQWLMDT

SEQ ID NO: 1750 - protein, 29 aa, Artificial Sequence
  Synthetic peptide
  MOD_RES (2)..(2): Xaa is AIB
  MOD_RES (10)..(10): Acylated with C16 fatty acyl group via acidic amino acid spacer
  MOD_RES (29)..(29): C-terminal amidation
HXQGTFTSDKSKYLDEQAAKEFICWLLDT

SEQ ID NO: 1751 - protein, 29 aa, Artificial Sequence
  Synthetic peptide
  MOD_RES (2)..(2): Xaa is AIB
  MOD_RES (10)..(10): Acylated with C16 fatty acyl group via acidic amino acid spacer
  MOD_RES (24)..(24): PEGYLATION
  MOD_RES (29)..(29): C-terminal amidation
HXQGTFTSDKSKYLDEQAAKEFICWLLDT

SEQ ID NO: 1752 - protein, 29 aa, Artificial Sequence
  Synthetic peptide
  MOD_RES (2)..(2): Xaa is AIB
  MOD_RES (10)..(10): Acylated with C16 fatty acyl group via acidic amino acid spacer
  MOD_RES (24)..(24): PEGYLATION
  MOD_RES (29)..(29): C-terminal amidation
HXQGTFTSDKSKYLDERAAQDFVCWLLDT

SEQ ID NO: 1753 - protein, 30 aa, Artificial Sequence; identical to SEQ ID NO: 1715
  Synthetic peptide
  MOD_RES (2)..(2): Xaa is AIB
  MOD_RES (10)..(10): Acylated with C16 fatty acyl group via acidic amino acid spacer
  MOD_RES (30)..(30): PEGYLATION
  MOD_RES (30)..(30): C-terminal amidation

SEQ ID NO: 1754 - protein, 29 aa, Artificial Sequence
  Synthetic peptide
  MOD_RES (10)..(10): Acylated with C16 fatty acyl group via acidic amino acid spacer
  MOD_RES (24)..(24): PEGYLATION
  MOD_RES (29)..(29): C-terminal amidation
HAQGTFTSDKSKYLDERAAQDFVCWLLDT

SEQ ID NO: 1755 - protein, 29 aa, Artificial Sequence
  Synthetic peptide
  MOD_RES (2)..(2): D-serine, D-alanine, valine, amino n-butyric acid, glycine, N-methyl serine, aminoisobutyric acid
  MOD_RES (10)..(10): Acylated with C16 fatty acyl group via acidic amino acid spacer
  MOD_RES (29)..(29): C-terminal amidation
HXQGTFTSDKSKYLDEQAAKEFICWLLDT

SEQ ID NO: 1756 - protein, 29 aa, Artificial Sequence
  Synthetic peptide
  MOD_RES (2)..(2): D-serine, D-alanine, valine, amino n-butyric acid, glycine, N-methyl serine, aminoisobutyric acid
  MOD_RES (10)..(10): Acylated with C16 fatty acyl group via acidic amino acid spacer
  MOD_RES (29)..(29): C-terminal amidation
HXQGTFTSDKSKYLDERAAQDFVQWLLDT

SEQ ID NO: 1757 - protein, 29 aa, Artificial Sequence
  Synthetic peptide
  MOD_RES (2)..(2): D-serine, D-alanine, valine, amino n-butyric acid, glycine, N-methyl serine, aminoisobutyric acid
  MOD_RES (10)..(10): Acylated with C16 fatty acyl group via acidic amino acid spacer
  MOD_RES (29)..(29): C-terminal amidation
HXQGTFTSDKSKYLDERAAQDFVCWLLDT

SEQ ID NO: 1758 - protein, 29 aa, Artificial Sequence
  Synthetic peptide
  MOD_RES (2)..(2): D-serine, D-alanine, valine, amino n-butyric acid, glycine, N-methyl serine, aminoisobutyric acid
  MOD_RES (10)..(10): Acylated with C16 fatty acyl group via acidic amino acid spacer
HXQGTFTSDKSKYLDEQAAKEFICWLLDT

SEQ ID NO: 1759 - protein, 31 aa, Artificial Sequence
  Synthetic peptide
  MOD_RES (2)..(2): D-serine, D-alanine, valine, amino n-butyric acid, glycine, N-methyl serine, aminoisobutyric acid
  MOD_RES (10)..(10): Acylated with C16 fatty acyl group via acidic amino acid spacer
  MOD_RES (31)..(31): C-terminal amidation
HXQGTFTSDKSKYLDEQAAKEFICWLLDTGE

SEQ ID NO: 1760 - protein, 31 aa, Artificial Sequence
  Synthetic peptide
  MOD_RES (2)..(2): D-serine, D-alanine, valine, amino n-butyric acid, glycine, N-methyl serine, aminoisobutyric acid
  MOD_RES (10)..(10): Acylated with C16 fatty acyl group via acidic amino acid spacer
  MOD_RES (24)..(24): PEGYLATION
HXQGTFTSDKSKYLDEQAAKEFICWLLDTGG

SEQ ID NO: 1761 - protein, 29 aa, Artificial Sequence
  Synthetic peptide
  MOD_RES (2)..(2): D-serine, D-alanine, valine, amino n-butyric acid, glycine, N-methyl serine, aminoisobutyric acid
  MOD_RES (10)..(10): Acylated with C16 fatty acyl group via acidic amino acid spacer
  MOD_RES (24)..(24): PEGYLATION
  MOD_RES (29)..(29): C-terminal amidation
HXQGTFTSDKSKYLDERAAQDFVCWLLDT

SEQ ID NO: 1762 - protein, 30 aa, Artificial Sequence
  Synthetic peptide
  MOD_RES (2)..(2): D-serine, D-alanine, valine, amino n-butyric acid, glycine, N-methyl serine, aminoisobutyric acid
  MOD_RES (10)..(10): Acylated with C16 fatty acyl group via acidic amino acid spacer
  MOD_RES (30)..(30): PEGYLATION
  MOD_RES (30)..(30): C-terminal amidation
HXQGTFTSDKSKYLDERAAQDFVQWLLDTC

SEQ ID NO: 1763 - protein, 30 aa, Artificial Sequence
  Synthetic peptide
  MOD_RES (2)..(2): D-serine, D-alanine, valine, amino n-butyric acid, glycine, N-methyl serine, aminoisobutyric acid
  MOD_RES (10)..(10): Acylated with C16 fatty acyl group via acidic amino acid spacer
  MOD_RES (24)..(24): PEGYLATION
  MOD_RES (30)..(30): C-terminal amidation
HXQGTFTSDYSKYLDSRRAQDFVQWLMNTE

SEQ ID NO: 1764 - protein, 30 aa, Artificial Sequence
  Synthetic peptide
  MOD_RES (2)..(2): D-serine, D-alanine, valine, amino n-butyric acid, glycine, N-methyl serine, aminoisobutyric acid
  MOD_RES (10)..(10): Acylated with C16 fatty acyl group via acidic amino acid spacer
  MOD_RES (24)..(24): PEGYLATION
HXQGTFTSDKSKYLDEQAAKEFICWLLDTC

SEQ ID NO: 1765 - protein, 29 aa, Artificial Sequence
  Synthetic peptide
  MOD_RES (1)..(1): Xaa is DMIA
  MOD_RES (10)..(10): Acylated with C16 fatty acyl group via acidic amino acid spacer
  MOD_RES (29)..(29): C-terminal amidation
XSQGTFTSDKSKYLDEQAAKEFICWLLDT

SEQ ID NO: 1766 - protein, 29 aa, Artificial Sequence
  Synthetic peptide
  MOD_RES (1)..(1): des-amino-His
  MOD_RES (10)..(10): Acylated with C16 fatty acyl group via acidic amino acid spacer
  MOD_RES (29)..(29): C-terminal amidation
HSQGTFTSDKSKYLDEQAAKEFICWLLDT

SEQ ID NO: 1767 - protein, 29 aa, Artificial Sequence
  Synthetic peptide
  MOD_RES (1)..(1): Ac-His
  MOD_RES (10)..(10): Acylated with C16 fatty acyl group via acidic amino acid spacer
  MOD_RES (24)..(24): PEGYLATION
  MOD_RES (29)..(29): C-terminal amidation
HSQGTFTSDKSKYLDEQAAKEFICWLLDT

SEQ ID NO: 1768 - protein, 29 aa, Artificial Sequence
  Synthetic peptide
  MOD_RES (2)..(2): Xaa is AIB
  MOD_RES (10)..(10): Acylated with C16 fatty acyl group via acidic amino acid spacer
  MOD_RES (29)..(29): C-terminal amidation
HXQGTFTSDKSKYLDEEAVRLFIEWLMNT

SEQ ID NO: 1769 - protein, 29 aa, Artificial Sequence
  Synthetic peptide
  MOD_RES (2)..(2): D-serine, D-alanine, valine, amino n-butyric acid, glycine, N-methyl serine, aminoisobutyric acid
  MOD_RES (24)..(24): PEGYLATION
  MOD_RES (29)..(29): C-terminal amidation
HXQGTFTSDYSKYLDEEAVRLFICWLMNT

SEQ ID NO: 1770 - protein, 29 aa, Artificial Sequence
  Synthetic peptide
  MOD_RES (2)..(2): D-serine, D-alanine, valine, amino n-butyric acid, glycine, N-methyl serine, aminoisobutyric acid
  MOD_RES (29)..(29): C-terminal amidation
HXQGTFTSDYSKYLDEEAVRLFIEWLMNT

SEQ ID NO: 1771 - protein, 29 aa, Artificial Sequence
  Synthetic peptide
  MOD_RES (2)..(2): D-serine, D-alanine, valine, amino n-butyric acid, glycine, N-methyl serine, aminoisobutyric acid
  MOD_RES (29)..(29): C-terminal amidation
HXQGTFTSDYSKYLDEEAVRLFICWLMNT

SEQ ID NO: 1772 - protein, 29 aa, Artificial Sequence
  Synthetic peptide
  MOD_RES (10)..(10): Acylated with C16 fatty acyl group via acidic amino acid spacer
  MOD_RES (29)..(29): C-terminal amidation
HSQGTFTSDKSKYLDEEAVRLFIEWLMNT

SEQ ID NO: 1773 - protein, 29 aa, Artificial Sequence
  Synthetic peptide
  MOD_RES (2)..(2): D-serine, D-alanine, valine, amino n-butyric acid, glycine, N-methyl serine, aminoisobutyric acid
  MISC_FEATURE (16)..(20): Salt bridge
  MISC_FEATURE (17)..(21): Salt bridge
  MOD_RES (24)..(24): PEGYLATION
  MOD_RES (29)..(29): C-terminal amidation
HXQGTFTSDYSKYLDEKRAKEFVCWLMNT

SEQ ID NO: 1774 - protein, 29 aa, Artificial Sequence
  Synthetic peptide
  MOD_RES (2)..(2): D-serine, D-alanine, valine, amino n-butyric acid, glycine, N-methyl serine, aminoisobutyric acid
  MOD_RES (16)..(16): Xaa is AIB
  MISC_FEATURE (16)..(20): Salt bridge
  MISC_FEATURE (17)..(21): Salt bridge
  MOD_RES (24)..(24): PEGYLATION
  MOD_RES (29)..(29): C-terminal amidation
HSQGTFTSDYSKYLDXKRAKEFVCWLMNT

SEQ ID NO: 1775 - protein, 29 aa, Artificial Sequence
  Synthetic peptide
  MOD_RES (2)..(2): D-serine, D-alanine, valine, amino n-butyric acid, glycine, N-methyl serine, aminoisobutyric acid
  MISC_FEATURE (16)..(20): Salt bridge
  MISC_FEATURE (17)..(21): Salt bridge
  MOD_RES (29)..(29): C-terminal amidation
HSQGTFTSDYSKYLDEKRAKEFVQWLMNT

SEQ ID NO: 1776 - protein, 29 aa, Artificial Sequence
  Synthetic peptide
  MOD_RES (2)..(2): D-serine, D-alanine, valine, amino n-butyric acid, glycine, N-methyl serine, aminoisobutyric acid
  MOD_RES (10)..(10): Acylated with C16 fatty acyl group via acidic amino acid spacer
  MISC_FEATURE (15)..(20): Salt bridge
  MOD_RES (16)..(16): Xaa is AIB
  MISC_FEATURE (16)..(21): Salt bridge
  MOD_RES (29)..(29): C-terminal amidation
HSQGTFTSDKSKYLDXKRAKEFVQWLMNT

SEQ ID NO: 1777-1800 - skipped (24 entries)

SEQ ID NO: 1801 - protein, 37 aa, Homo sapiens
HSQGTFTSDYSKYLDSRRAQDFVQWLMNTKRNRNNIA

SEQ ID NO: 1802 - protein, 37 aa, Artificial Sequence
  OXM analog
HSEGTFTSDYSKYLDSRRAQDFVQWLMNTKRNRNNIA

SEQ ID NO: 1803 - protein, 37 aa, Artificial Sequence
  OXM analog
HSDGTFTSDYSKYLDSRRAQDFVQWLMNTKRNRNNIA

SEQ ID NO: 1804 - protein, 38 aa, Artificial Sequence
  OXM analog
  MOD_RES (2)..(2): Xaa=Aminoisobutyric acid
  MOD_RES (38)..(38): C-terminal amidation
HXQGTFTSDYSKYLDSRRAQDFVQWLMNTKRNRNNIAC

SEQ ID NO: 1805 - protein, 38 aa, Artificial Sequence
  OXM analog
  MOD_RES (2)..(2): Xaa=D-serine
  MOD_RES (38)..(38): Xaa=Cys(mPEG)5kDa
  MOD_RES (38)..(38): C-terminal amidation
HXQGTFTSDYSKYLDSRRAQDFVQWLMNTKRNRNNIAX

SEQ ID NO: 1806 - protein, 38 aa, Artificial Sequence; identical to SEQ ID NO: 1805
  OXM analog
  MOD_RES (2)..(2): Xaa=D-serine
  MOD_RES (38)..(38): Xaa=Cys(mPEG)20kDa
  MOD_RES (38)..(38): C-terminal amidation

SEQ ID NO: 1807 - protein, 38 aa, Artificial Sequence; identical to SEQ ID NO: 1805
  OXM analog
  MOD_RES (2)..(2): Xaa=D-serine
  MOD_RES (38)..(38): Xaa=Cys(mPEG)2 40kDa
  MOD_RES (38)..(38): C-terminal amidation

SEQ ID NO: 1808 - protein, 38 aa, Artificial Sequence; identical to SEQ ID NO: 1805
  OXM analog
  MOD_RES (2)..(2): Xaa=D-serine
  MOD_RES (38)..(38): Xaa=Cys(9cholest-5-en-3-yl{[(2R)-3-amino-2-(amino) -3-oxopropyl]thio}acetate)
  MOD_RES (38)..(38): C-terminal amidation

SEQ ID NO: 1809 - protein, 38 aa, Artificial Sequence; identical to SEQ ID NO: 1805
  OXM analog
  MOD_RES (2)..(2): Xaa=Aminoisobutyric acid
  MOD_RES (38)..(38): Xaa=Cys(mPEG)5kDa
  MOD_RES (38)..(38): C-terminal amidation

SEQ ID NO: 1810 - protein, 38 aa, Artificial Sequence; identical to SEQ ID NO: 1805
  OXM analog
  MOD_RES (2)..(2): Xaa=aminoisobutyric acid
  MOD_RES (38)..(38): Xaa=Cys(mPEG)20kDa
  MOD_RES (38)..(38): C-terminal amidation

SEQ ID NO: 1811 - protein, 38 aa, Artificial Sequence; identical to SEQ ID NO: 1805
  OXM analog
  MOD_RES (2)..(2): X=aminoisobutyric acid
  MOD_RES (38)..(38): Xaa=Cys(mPEG)2 40kDa
  MOD_RES (38)..(38): C-terminal amidation

SEQ ID NO: 1812 - protein, 38 aa, Artificial Sequence; identical to SEQ ID NO: 1805
  OXM analog
  MOD_RES (2)..(2): Xaa=aminoisobutyric acid
  MOD_RES (38)..(38): Xaa=Cys(cholest-5-en-3-yl{[(2R)-3-amino-2-(amino)- 3-oxopropyl]thio}acetate)
  MOD_RES (38)..(38): C-terminal amidation

SEQ ID NO: 1813 - protein, 38 aa, Artificial Sequence
  OXM analog
  MOD_RES (2)..(2): Xaa=aminoisobutyric acid
  MOD_RES (27)..(27): Xaa=methionine sulfoxide
  MOD_RES (38)..(38): Xaa=Cys(mPEG)240kDa
  MOD_RES (38)..(38): C-terminal amidation
HXQGTFTSDYSKYLDSRRAQDFVQWLXNTKRNRNNIAX

SEQ ID NO: 1814 - protein, 38 aa, Artificial Sequence; identical to SEQ ID NO: 1813
  OXM analog
  MOD_RES (2)..(2): Xaa=Aib
  MOD_RES (27)..(27): Xaa=methionine sulfoxide
  MOD_RES (38)..(38): Xaa=Cys(mPEG)260kDa
  MOD_RES (38)..(38): C-terminal amidation

SEQ ID NO: 1815 - protein, 37 aa, Artificial Sequence
  OXM analog
  MOD_RES (2)..(2): Xaa=Aib
  MOD_RES (20)..(20): Xaa=Cys(mPEG)240kDa
  MOD_RES (37)..(37): C-terminal amidation
HXQGTFTSDYSKYLDSRRAXDFVQWLMNTKRNRNNIA

SEQ ID NO: 1816 - protein, 37 aa, Artificial Sequence
  OXM analog
  MOD_RES (2)..(2): Xaa=Aib
  MOD_RES (21)..(21): Xaa=Cys(mPEG)240kDa
  MOD_RES (37)..(37): C-terminal amidation
HXQGTFTSDYSKYLDSRRAQXFVQWLMNTKRNRNNIA

SEQ ID NO: 1817 - protein, 37 aa, Artificial Sequence
  OXM analog
  MOD_RES (2)..(2): Aib
  MOD_RES (24)..(24): Xaa=Cys(mPEG)240kDa
  MOD_RES (27)..(27): Xaa=metionine sulfoxide
  MOD_RES (37)..(37): C-terminal amidation
HXQGTFTSDYSKYLDSRRAQDFVXWLXNTKRNRNNIA

SEQ ID NO: 1818 - protein, 37 aa, Artificial Sequence
  OXM analog
  MOD_RES (2)..(2): Xaa=Aib
  MOD_RES (28)..(28): Xaa=Cys(mPEG)240kDa
  MOD_RES (37)..(37): C-terminal amidation
HXQGTFTSDYSKYLDSRRAQDFVQWLMXTKRNRNNIA

SEQ ID NO: 1819 - protein, 38 aa, Artificial Sequence; identical to SEQ ID NO: 1805
  OXM analog
  MOD_RES (2)..(2): Xaa=D-serine
  MOD_RES (38)..(38): Xaa=Lys(palmitoyl)
  MOD_RES (38)..(38): C-terminal amidation

SEQ ID NO: 1820 - protein, 38 aa, Artificial Sequence
  OXM analog
  MOD_RES (1)..(1): Xaa=desamino-His (deltaNH2-H)
  MOD_RES (2)..(2): Xaa=Aib
  MOD_RES (27)..(27): Xaa=mrtionine sulfoxide
  MOD_RES (38)..(38): Xaa=Cys(mPEG)240kDa
  MOD_RES (38)..(38): C-terminal amidation
XXQGTFTSDYSKYLDSRRAQDFVQWLXNTKRNRNNIAX

SEQ ID NO: 1821 - protein, 38 aa, Artificial Sequence; identical to SEQ ID NO: 1805
  OXM analog
  MOD_RES (2)..(2): xaa=D-serine
  MOD_RES (38)..(38): Xaa=Cys(cholest-5-en-3-yl 1-{[(2R)-3-amino-2-(amino)-3-oxopropyl]thio}-2-oxo -6,9,12,15-tetraoxa-3-azaoctadecan-18-oate]) or Cys(Oxa4-cholesterol))
  MOD_RES (38)..(38): C-terminal amidation

SEQ ID NO: 1822 - protein, 37 aa, Artificial Sequence
  OXM analog
  MOD_RES (2)..(2): Xaa=Aib
  MOD_RES (11)..(11): Xaa=Cys(mPEG)240kDa
  MOD_RES (27)..(27): Xaa=methionine sulfoxide
  MOD_RES (37)..(37): C-terminal amidation
HXQGTFTSDYXKYLDSRRAQDFVQWLXNTKRNRNNIA

SEQ ID NO: 1823 - protein, 37 aa, Artificial Sequence
  OXM analog
  MOD_RES (2)..(2): Xaa=Aib
  MOD_RES (12)..(12): Xaa=Cys(mPEG)240kDa
  MOD_RES (27)..(27): Xaa=Methionine sulfoxide
  MOD_RES (37)..(37): C-terminal amidation
HXQGTFTSDYSXYLDSRRAQDFVQWLXNTKRNRNNIA

SEQ ID NO: 1824 - protein, 38 aa, Artificial Sequence; identical to SEQ ID NO: 1805
  OXM analog
  MOD_RES (2)..(2): Xaa=Aib
  MOD_RES (38)..(38): Xaa=Lys(palmitoyl)
  MOD_RES (38)..(38): C-terminal amidation

SEQ ID NO: 1825 - protein, 38 aa, Artificial Sequence
  OXM analog
  MOD_RES (2)..(2): Xaa=Aib
  MOD_RES (27)..(27): Xaa=Nle
  MOD_RES (38)..(38): C-terminal amidation
HXQGTFTSDYSKYLDSRRAQDFVQWLXNTKRNRNNIAC

SEQ ID NO: 1826 - protein, 38 aa, Artificial Sequence; identical to SEQ ID NO: 1825
  OXM analog
  MOD_RES (2)..(2): Xaa=Aib
  MOD_RES (27)..(27): Xaa=O-methyl-L-homoserine
  MOD_RES (38)..(38): C-terminal amidation

SEQ ID NO: 1827 - protein, 38 aa, Artificial Sequence; identical to SEQ ID NO: 1813
  OXM analog
  MOD_RES (2)..(2): Xaa=Aib
  MOD_RES (27)..(27): Xaa=Nle
  MOD_RES (38)..(38): Xaa=Cys(cholest-5-en-3-yl{[(2R)-3-amino-2-(amino)- 3-oxopropyl]thio}acetate)
  MOD_RES (38)..(38): C-terminal amidation

SEQ ID NO: 1828 - protein, 38 aa, Artificial Sequence; identical to SEQ ID NO: 1813
  OXM analog
  MOD_RES (2)..(2): Xaa=Aib
  MOD_RES (27)..(27): Xaa=O-methyl-L-homoserine
  MOD_RES (38)..(38): Xaa=Cys(cholest-5-en-3-yl{[(2R)-3-amino-2-(amino)- 3-oxopropyl]thio}acetate)
  MOD_RES (38)..(38): C-terminal amidation

SEQ ID NO: 1829 - protein, 38 aa, Artificial Sequence; identical to SEQ ID NO: 1805
  OXM analog
  MOD_RES (2)..(2): Xaa=Aib
  MOD_RES (38)..(38): Xaa=Cys(cholest-5-en-3-yl 1-{[(2R)-3-amino-2-(amino)-3-oxopropyl]thio}-2-oxo -6,9,12,15-tetraoxa-3-azaoctadecan-18-oate]) or Cys(Oxa4-cholesterol))
  MOD_RES (38)..(38): C-terminal amidation

SEQ ID NO: 1830 - protein, 38 aa, Artificial Sequence; identical to SEQ ID NO: 1804
  OXM analog
  MOD_RES (2)..(2): Xaa=D-serine
  MOD_RES (38)..(38): C-terminal amidation

SEQ ID NO: 1831 - protein, 38 aa, Artificial Sequence; identical to SEQ ID NO: 1813
  OXM analog
  MOD_RES (2)..(2): Xaa=D-serine
  MOD_RES (27)..(27): Xaa=metionine sulfoxide
  MOD_RES (38)..(38): Xaa=Cys(cholest-5-en-3-yl 1-{[(2R)-3-amino-2-(amino)-3-oxopropyl]thio}-2-oxo -6,9,12,15-tetraoxa-3-azaoctadecan-18-oate]) or Cys(Oxa4-cholesterol))
  MOD_RES (38)..(38): C-terminal amidation

SEQ ID NO: 1832 - protein, 38 aa, Artificial Sequence; identical to SEQ ID NO: 1813
  OXM analog
  MOD_RES (2)..(2): Xaa=D-serine
  MOD_RES (27)..(27): Xaa=methionine sulfoxide
  MOD_RES (38)..(38): Xaa=Cys(CH2CONH2)
  MOD_RES (38)..(38): C-terminal amidation

SEQ ID NO: 1833 - protein, 37 aa, Artificial Sequence
  OXM analog
  MOD_RES (2)..(2): Xaa=1-Amino-1-cyclohexane carboxylic acid
  MOD_RES (37)..(37): C-terminal amidation
HXQGTFTSDYSKYLDSRRAQDFVQWLMNTKRNRNNIA

SEQ ID NO: 1834 - protein, 37 aa, Artificial Sequence; identical to SEQ ID NO: 1833
  OXM analog
  MOD_RES (2)..(2): Xaa=Abu
  MOD_RES (37)..(37): C-terminal amidation

SEQ ID NO: 1835 - protein, 37 aa, Artificial Sequence; identical to SEQ ID NO: 1833
  OXM analog
  MOD_RES (2)..(2): Xaa=D-abu
  MOD_RES (37)..(37): C-terminal amidation

SEQ ID NO: 1836 - protein, 37 aa, Artificial Sequence; identical to SEQ ID NO: 1833
  OXM analog
  MOD_RES (2)..(2): Xaa=Nva (Aminovaleric acid)
  MOD_RES (37)..(37): C-terminal amidation

SEQ ID NO: 1837 - protein, 37 aa, Artificial Sequence; identical to SEQ ID NO: 1833
  OXM analog
  MOD_RES (2)..(2): Xaa= beta-cyclopropyl-alanine
  MOD_RES (37)..(37): C-terminal amidation

SEQ ID NO: 1838 - protein, 37 aa, Artificial Sequence; identical to SEQ ID NO: 1833
  OXM analog
  MOD_RES (2)..(2): Xaa=propargylglycine
  MOD_RES (37)..(37): C-terminal amidation

SEQ ID NO: 1839 - protein, 37 aa, Artificial Sequence; identical to SEQ ID NO: 1833
  OXM analog
  MOD_RES (2)..(2): Xaa=Allylglycine
  MOD_RES (37)..(37): C-terminal amidation

SEQ ID NO: 1840 - protein, 37 aa, Artificial Sequence; identical to SEQ ID NO: 1833
  OXM analog
  MOD_RES (2)..(2): Xaa=2-Amino-2-cyclohexyl-propanoic acid
  MOD_RES (37)..(37): C-terminal amidation

SEQ ID NO: 1841 - protein, 37 aa, Artificial Sequence; identical to SEQ ID NO: 1833
  OXM analog
  MOD_RES (2)..(2): Xaa=D-tertbutylglycine
  MOD_RES (37)..(37): C-terminal amidation

SEQ ID NO: 1842 - protein, 37 aa, Artificial Sequence; identical to SEQ ID NO: 1833
  OXM analog
  MOD_RES (2)..(2): Xaa=Vinylglycine
  MOD_RES (37)..(37): C-terminal amidation

SEQ ID NO: 1843 - protein, 37 aa, Artificial Sequence; identical to SEQ ID NO: 1833
  OXM analog
  MOD_RES (2)..(2): Xaa=1-Amino-1-cyclopropane carboxylic acid
  MOD_RES (37)..(37): C-terminal amidation

SEQ ID NO: 1844 - protein, 37 aa, Artificial Sequence; identical to SEQ ID NO: 1833
  OXM analog
  MOD_RES (2)..(2): Xaa=1-Amino-1-cyclobutane carboxylic acid
  MOD_RES (37)..(37): C-terminal amidation

SEQ ID NO: 1845 - protein, 37 aa, Artificial Sequence; identical to SEQ ID NO: 1833
  OXM analog
  MOD_RES (2)..(2): Xaa=1-Amino-1-cyclopentane carboxylic acid
  MOD_RES (37)..(37): C-terminal amidation

SEQ ID NO: 1846 - protein, 38 aa, Artificial Sequence
  OXM analog
  MOD_RES (2)..(2): Xaa=D-serine
  MOD_RES (38)..(38): C-terminal amidation
HXQGTFTSDYSKYLDSEAAQDFVQWLMNTKRNRNNIAC

SEQ ID NO: 1847 - protein, 31 aa, Artificial Sequence
  OXM analog
  MOD_RES (2)..(2): Xaa=D-serine
  MOD_RES (31)..(31): C-terminal amidation
HXQGTFTSDYSKYLDSRRAQDFVQWLMNTKC

SEQ ID NO: 1848 - protein, 31 aa, Artificial Sequence
  OXM analog
  MOD_RES (2)..(2): Xaa=D-serine
  MOD_RES (31)..(31): C-terminal amidation
HXQGTFTSDYSKYLDSEAAQDFVQWLMNTKC

SEQ ID NO: 1849 - protein, 31 aa, Artificial Sequence
  OXM analog
  MOD_RES (2)..(2): Xaa=D-serine
  MOD_RES (31)..(31): C-terminal amidation
HXQGTFTSDYSKYLDSERAQDFVQWLMNTKC

SEQ ID NO: 1850 - protein, 31 aa, Artificial Sequence
  OXM analog
  MOD_RES (2)..(2): Xaa=D-serine
  MOD_RES (31)..(31): C-terminal amidation
HXQGTFTSDYSKYLDSRAAQDFVQWLMNTKC

SEQ ID NO: 1851 - protein, 38 aa, Artificial Sequence
  OXM analog
  MOD_RES (2)..(2): Xaa=D-serine
  MOD_RES (38)..(38): Xaa=Cys(cholest-5-en-3-yl 1-{[(2R)-3-amino-2-(amino)-3-oxopropyl]thio}-2-oxo -6,9,12,15-tetraoxa-3-azaoctadecan-18-oate]) or Cys(Oxa4-cholesterol))
  MOD_RES (38)..(38): C-terminal amidation
HXQGTFTSDYSKYLDSEAAQDFVQWLMNTKRNRNNIAX

SEQ ID NO: 1852 - protein, 31 aa, Artificial Sequence
  OXM analog
  MOD_RES (2)..(2): Xaa=D-serine
  MOD_RES (31)..(31): Xaa=Cys(cholest-5-en-3-yl 1-{[(2R)-3-amino-2-(amino)-3-oxopropyl]thio}-2-oxo -6,9,12,15-tetraoxa-3-azaoctadecan-18-oate]) or Cys(Oxa4-cholesterol))
  MOD_RES (31)..(31): C-terminal amidation
HXQGTFTSDYSKYLDSRRAQDFVQWLMNTKX

SEQ ID NO: 1853 - protein, 31 aa, Artificial Sequence
  OXM analog
  MOD_RES (2)..(2): X=D-serine
  MOD_RES (31)..(31): Xaa=Cys(cholest-5-en-3-yl 1-{[(2R)-3-amino-2-(amino)-3-oxopropyl]thio}-2-oxo -6,9,12,15-tetraoxa-3-azaoctadecan-18-oate]) or Cys(Oxa4-cholesterol))
  MOD_RES (31)..(31): C-terminal amidation
HXQGTFTSDYSKYLDSEAAQDFVQWLMNTKX

SEQ ID NO: 1854 - protein, 31 aa, Artificial Sequence
  OXM analog
  MOD_RES (2)..(2): Xaa=D-serine
  MOD_RES (31)..(31): Xaa=Cys(cholest-5-en-3-yl 1-{[(2R)-3-amino-2-(amino)-3-oxopropyl]thio}-2-oxo -6,9,12,15-tetraoxa-3-azaoctadecan-18-oate]) or Cys(Oxa4-cholesterol))
  MOD_RES (31)..(31): C-terminal amidation
HXQGTFTSDYSKYLDSERAQDFVQWLMNTKX

SEQ ID NO: 1855 - protein, 31 aa, Artificial Sequence
  OXM analog
  MOD_RES (2)..(2): Xaa=D-serine
  MOD_RES (31)..(31): Xaa=Cys(cholest-5-en-3-yl 1-{[(2R)-3-amino-2-(amino)-3-oxopropyl]thio}-2-oxo -6,9,12,15-tetraoxa-3-azaoctadecan-18-oate]) or Cys(Oxa4-cholesterol))
  MOD_RES (31)..(31): C-terminal amidation
HXQGTFTSDYSKYLDSRAAQDFVQWLMNTKX

SEQ ID NO: 1856 - protein, 31 aa, Artificial Sequence; identical to SEQ ID NO: 1852
  OXM analog
  MOD_RES (2)..(2): Xaa=D-serine
  MOD_RES (31)..(31): Xaa=Lys(Palmitoyl)
  MOD_RES (31)..(31): C-terminal amidation

SEQ ID NO: 1857 - protein, 31 aa, Artificial Sequence; identical to SEQ ID NO: 1853
  OXM analog
  MOD_RES (2)..(2): Xaa=D-serine
  MOD_RES (31)..(31): Xaa=Lys(palmitoyl)
  MOD_RES (31)..(31): C-terminal amidation

SEQ ID NO: 1858 - protein, 32 aa, Artificial Sequence
  OXM analog
  MOD_RES (2)..(2): Xaa=D-serine
  MOD_RES (31)..(31): Xaa=Ttds
  MOD_RES (32)..(32): Xaa=Lys(Palmitoyl)
  MOD_RES (32)..(32): C-terminal amidation
HXQGTFTSDYSKYLDSRRAQDFVQWLMNTKXX

SEQ ID NO: 1859 - protein, 32 aa, Artificial Sequence
  OXM analog
  MOD_RES (2)..(2): Xaa=D-serine
  MOD_RES (31)..(31): Xaa=Ttds
  MOD_RES (32)..(32): Xaa=Lys(Palmitoyl)
  MOD_RES (32)..(32): C-terminal amidation
HXQGTFTSDYSKYLDSEAAQDFVQWLMNTKXX

SEQ ID NO: 1860 - protein, 32 aa, Artificial Sequence; identical to SEQ ID NO: 1858
  OXM analog
  MOD_RES (2)..(2): Xaa=D-serine
  MOD_RES (31)..(31): Xaa=gamma glutamic acid
  MOD_RES (32)..(32): Xaa=Cys(cholest-5-en-3-yl{[(2R)-3-amino-2-(amino)- 3-oxopropyl]thio}acetate)
  MOD_RES (32)..(32): C-terminal amidation

SEQ ID NO: 1861 - protein, 32 aa, Artificial Sequence; identical to SEQ ID NO: 1859
  OXM analog
  MOD_RES (2)..(2): Xaa=D-serine
  MOD_RES (31)..(31): Xaa=gamma glutamic acid
  MOD_RES (32)..(32): Xaa=Cys(cholest-5-en-3-yl{[(2R)-3-amino-2-(amino)- 3-oxopropyl]thio}acetate)
  MOD_RES (32)..(32): C-terminal amidation

SEQ ID NO: 1862 - protein, 31 aa, Artificial Sequence; identical to SEQ ID NO: 1853
  OXM analog
  MOD_RES (2)..(2): Xaa=Aib
  MOD_RES (31)..(31): Xaa= Cys(cholest-5-en-3-yl 1-{[(2R)-3-amino-2-(amino)-3-oxopropyl]thio}-2-oxo -6,9,12,15-tetraoxa-3-azaoctadecan-18-oate]) or Cys(Oxa4-cholesterol))
  MOD_RES (31)..(31): C-terminal amidation

SEQ ID NO: 1863 - protein, 39 aa, Artificial Sequence
  OXM analog
  MOD_RES (2)..(2): Xaa=D-serine
  MOD_RES (38)..(38): Xaa=gamma glutamic acid
  MOD_RES (39)..(39): Xaa=Cys(cholest-5-en-3-yl{[(2R)-3-amino-2-(amino)- 3-oxopropyl]thio}acetate)
  MOD_RES (39)..(39): C-terminal amidation
HXQGTFTSDYSKYLDSEAAQDFVQWLMNTKRNRNNIAXX

SEQ ID NO: 1864 - protein, 32 aa, Artificial Sequence
  OXM analog
  MOD_RES (2)..(2): Xaa=D-serine
  MOD_RES (32)..(32): Xaa=Cys(cholest-5-en-3-yl 1-{[(2R)-3-amino-2-(amino)-3-oxopropyl]thio}-2-oxo -6,9,12,15-tetraoxa-3-azaoctadecan-18-oate]) or Cys(Oxa4-cholesterol))
  MOD_RES (32)..(32): C-terminal amidation
HXQGTFTSDYSKYLDSEAAQDFVQWLMNTKRX

SEQ ID NO: 1865 - protein, 38 aa, Artificial Sequence; identical to SEQ ID NO: 1851
  OXM analog
  MOD_RES (2)..(2): Xaa=D-serine
  MOD_RES (38)..(38): Xaa=Cys(cholest-5-en-3-yl 1-{[(2R)-3-amino-2-(amino)-3-oxopropyl]thio}-2-oxo -6,9,12,15-tetraoxa-3-azaoctadecan-18-oate]) or Cys(Oxa4-cholesterol))

SEQ ID NO: 1866 - protein, 31 aa, Artificial Sequence; identical to SEQ ID NO: 1854
  OXM analog
  MOD_RES (2)..(2): Xaa=Aib
  MOD_RES (31)..(31): Xaa=Cys(cholest-5-en-3-yl 1-{[(2R)-3-amino-2-(amino)-3-oxopropyl]thio}-2-oxo -6,9,12,15-tetraoxa-3-azaoctadecan-18-oate]) or Cys(Oxa4-cholesterol))
  MOD_RES (31)..(31): C-terminal amidation

SEQ ID NO: 1867 - protein, 32 aa, Artificial Sequence; identical to SEQ ID NO: 1858
  OXM analog
  MOD_RES (2)..(2): Xaa=Aib
  MOD_RES (31)..(31): Xaa=gamma glutamic acid
  MOD_RES (32)..(32): Xaa=Cys(cholest-5-en-3-yl{[(2R)-3-amino-2-(amino)- 3-oxopropyl]thio}acetate)

SEQ ID NO: 1868 - protein, 39 aa, Artificial Sequence; identical to SEQ ID NO: 1863
  OXM analog
  MOD_RES (2)..(2): Xaa=D-serine
  MOD_RES (38)..(38): Xaa=gamma glutamic acid
  MOD_RES (39)..(39): Xaa=Lys(Palmitoyl)
  MOD_RES (39)..(39): C-terminal amidation

SEQ ID NO: 1869 - protein, 33 aa, Artificial Sequence
  OXM analog
  MOD_RES (2)..(2): Xaa=D-serine
  MOD_RES (31)..(32): Xaa=gamma glutamic acid
  MOD_RES (33)..(33): Xaa=Cys(cholest-5-en-3-yl{[(2R)-3-amino-2-(amino)- 3-oxopropyl]thio}acetate)
HXQGTFTSDYSKYLDSRRAQDFVQWLMNTKXXX

SEQ ID NO: 1870 - protein, 32 aa, Artificial Sequence
  OXM analog
  MOD_RES (2)..(2): Xaa=D-serine
  MOD_RES (31)..(31): Xaa=gamma glutamic acid
  MOD_RES (32)..(32): Xaa=Cys(cholest-5-en-3-yl 1{[(2R)-3-amino-2-(amino)-3-oxopropyl]thio}acetate )
HXQGTFTSDYSSYLDSRRAQDFVQWLMNTKXX

SEQ ID NO: 1871 - protein, 32 aa, Artificial Sequence
  OXM analog
  MOD_RES (2)..(2): Xaa=D-serine
  MOD_RES (31)..(31): Xaa=gamma glutamic acid
  MOD_RES (32)..(32): Xaa=Cys(cholest-5-en-3-yl 1{[(2R)-3-amino-2-(amino)-3-oxopropyl]thio}acetate );
HXQGTFTSDYSKYLDSRAAQDFVQWLMNTKXX

SEQ ID NO: 1872 - protein, 32 aa, Artificial Sequence; identical to SEQ ID NO: 1870
  OXM analog
  MOD_RES (2)..(2): Xaa=D-serine
  MOD_RES (31)..(31): Xaa=gamma glutamic acid
  MOD_RES (32)..(32): Xaa=Cys(cholest-5-en-3-yl 1-{[(2R)-3-amino-2-(amino)-3-oxopropyl]thio}-2-oxo -6,9,12,15-tetraoxa-3-azaoctadecan-18-oate]) or Cys(Oxa4-cholesterol)

SEQ ID NO: 1873 - protein, 32 aa, Artificial Sequence; identical to SEQ ID NO: 1871
  OXM analog
  MOD_RES (2)..(2): Xaa=D-serine
  MOD_RES (31)..(31): Xaa=gamma glutamic acid
  MOD_RES (32)..(32): Xaa=Cys(cholest-5-en-3-yl 1-{[(2R)-3-amino-2-(amino)-3-oxopropyl]thio}-2-oxo -6,9,12,15-tetraoxa-3-azaoctadecan-18-oate]) or Cys(Oxa4-cholesterol)

SEQ ID NO: 1874 - protein, 32 aa, Artificial Sequence
  OXM analog
  MOD_RES (2)..(2): Xaa=D-serine
  MOD_RES (31)..(31): Xaa=gamma glutamic acid
  MOD_RES (32)..(32): Xaa=Cys(cholest-5-en-3-yl 1{[(2R)-3-amino-2-(amino)-3-oxopropyl]thio}acetate )
HXQGTFTSDYSKYLDERRAQDFVQWLMNTKXX

SEQ ID NO: 1875 - protein, 32 aa, Artificial Sequence; identical to SEQ ID NO: 1874
  OXM analog
  MOD_RES (2)..(2): Xaa=D-serine
  MOD_RES (31)..(31): Xaa=gamma glutamic acid
  MOD_RES (32)..(32): Xaa=Cys(cholest-5-en-3-yl 1-{[(2R)-3-amino-2-(amino)-3-oxopropyl]thio}-2-oxo -6,9,12,15-tetraoxa-3-azaoctadecan-18-oate]) or Cys(Oxa4-cholesterol)

SEQ ID NO: 1876 - protein, 33 aa, Artificial Sequence; identical to SEQ ID NO: 1869
  OXM analog
  MOD_RES (2)..(2): Xaa=D-serine
  MOD_RES (31)..(32): Xaa=gamma glutamic acid
  MOD_RES (33)..(33): Xaa=Cys(cholest-5-en-3-yl 1-{[(2R)-3-amino-2-(amino)-3-oxopropyl]thio}-2-oxo -6,9,12,15-tetraoxa-3-azaoctadecan-18-oate]) or Cys(Oxa4-cholesterol)

SEQ ID NO: 1877 - protein, 33 aa, Artificial Sequence; identical to SEQ ID NO: 1869
  OXM analog
  MOD_RES (2)..(2): Xaa=D-serine
  MOD_RES (31)..(32): Xaa=gamma glutamic acid
  MOD_RES (33)..(33): Xaa=S-{1-[46-(cholest-5-en-3-yloxy)-3,43,46-trioxo -7,10,13,16,19,22,25,28,31,34,37,40-dodecaoxa-4,44 -diazahexatetracont-1-yl]-2,5-dioxopyrrolidin-3-yl }-L-cysteine or Cys (mal-oxa12-cholesterol)

SEQ ID NO: 1878 - protein, 33 aa, Artificial Sequence; identical to SEQ ID NO: 1869
  OXM analog
  MOD_RES (2)..(2): Xaa=Aib
  MOD_RES (31)..(32): Xaa=gamma glutamic acid
  MOD_RES (33)..(33): Xaa== Cys(cholest-5-en-3-yl 1-{[(2R)-3-amino-2-(amino)-3-oxopropyl]thio}-2-oxo -6,9,12,15-tetraoxa-3-azaoctadecan-18-oate]) or Cys(Oxa4-cholesterol)

SEQ ID NO: 1879 - protein, 33 aa, Artificial Sequence; identical to SEQ ID NO: 1869
  OXM analog
  MOD_RES (2)..(2): Xaa=1-Amino-1-cyclobutane carboxylic acid
  MOD_RES (31)..(32): Xaa=gamma glutamic acid
  MOD_RES (33)..(33): Xaa=Cys(cholest-5-en-3-yl 1-{[(2R)-3-amino-2-(amino)-3-oxopropyl]thio}-2-oxo -6,9,12,15-tetraoxa-3-azaoctadecan-18-oate]) or Cys(Oxa4-cholesterol)

SEQ ID NO: 1880 - protein, 33 aa, Artificial Sequence
  OXM analog
  MOD_RES (2)..(2): Xaa=D-serine
  MISC_FEATURE (16)..(20): Lactam bridge between side chains
  MOD_RES (31)..(32): Xaa=gamma glutamic acid
  MOD_RES (33)..(33): Xaa=S-[42-(cholest-5-en-3-yloxy)-2,42-dioxo-6,9,12 ,15,18,21,24,27,30,33,36,39-dodecaoxa-3-azadotetra cont-1-yl]-L-cysteine or Cys (oxa12-cholesterol)
HXQGTFTSDYSKYLDERRAKDFVQWLMNTKXXX

SEQ ID NO: 1881 - protein, 33 aa, Artificial Sequence; identical to SEQ ID NO: 1880
  OXM analog
  MOD_RES (2)..(2): Xaa=Aib
  MISC_FEATURE (16)..(20): Lactam bridge between side chains
  MOD_RES (31)..(32): Xaa=gamma glutamic acid
  MOD_RES (33)..(33): Xaa=S-[42-(cholest-5-en-3-yloxy)-2,42-dioxo-6,9,12 ,15,18,21,24,27,30,33,36,39-dodecaoxa-3-azadotetra cont-1-yl]-L-cysteine or Cys (oxa12-cholesterol)

SEQ ID NO: 1882 - protein, 33 aa, Artificial Sequence; identical to SEQ ID NO: 1880
  OXM analog
  MOD_RES (2)..(2): Xaa=1-Amino-1-cyclobutane carboxylic acid
  MISC_FEATURE (16)..(20): Lactam bridge between side chains
  MOD_RES (31)..(32): Xaa=gamma glutamic acid
  MOD_RES (33)..(33): Xaa=S-[42-(cholest-5-en-3-yloxy)-2,42-dioxo-6,9,12 ,15,18,21,24,27,30,33,36,39-dodecaoxa-3-azadotetra cont-1-yl]-L-cysteine or Cys (oxa12-cholesterol)

SEQ ID NO: 1883 - protein, 33 aa, Artificial Sequence; identical to SEQ ID NO: 1869
  OXM analog
  MOD_RES (2)..(2): Xaa=D-serine
  MOD_RES (31)..(32): Xaa=gamma glutamic acid
  MOD_RES (33)..(33): Xaa=S-[42-(cholest-5-en-3-yloxy)-2,42-dioxo-6,9,12 ,15,18,21,24,27,30,33,36,39-dodecaoxa-3-azadotetra cont-1-yl]-L-cysteine or Cys (oxa12-cholesterol)

SEQ ID NO: 1884 - protein, 33 aa, Artificial Sequence; identical to SEQ ID NO: 1869
  OXM analog
  MOD_RES (2)..(2): Xaa=Aib
  MOD_RES (31)..(32): Xaa=gamma glutamic acid
  MOD_RES (33)..(33): Xaa=S-[42-(cholest-5-en-3-yloxy)-2,42-dioxo-6,9,12 ,15,18,21,24,27,30,33,36,39-dodecaoxa-3-azadotetra cont-1-yl]-L-cysteine or Cys (oxa12-cholesterol)

SEQ ID NO: 1885 - protein, 33 aa, Artificial Sequence; identical to SEQ ID NO: 1869
  OXM analog
  MOD_RES (2)..(2): Xaa=1-Amino-1-cyclobutane carboxylic acid
  MOD_RES (31)..(32): Xaa=gamma glutamic acid
  MOD_RES (33)..(33): Xaa=S-[42-(cholest-5-en-3-yloxy)-2,42-dioxo-6,9,12 ,15,18,21,24,27,30,33,36,39-dodecaoxa-3-azadotetra cont-1-yl]-L-cysteine or Cys (oxa12-cholesterol)

SEQ ID NO: 1886 - protein, 33 aa, Artificial Sequence; identical to SEQ ID NO: 1869
  OXM analog
  MOD_RES (2)..(2): Xaa=D-serine
  MOD_RES (31)..(32): Xaa=gamma glutamic acid
  MOD_RES (33)..(33): Xaa=Lys(gamma-glutamic acid-palmitoyl)
  MOD_RES (33)..(33): C-terminal amidation

SEQ ID NO: 1887 - protein, 33 aa, Artificial Sequence
  OXM analog
  MOD_RES (2)..(2): Xaa=D-serine
  MOD_RES (31)..(32): Xaa=gamma glutamic acid
  MOD_RES (33)..(33): Xaa=S-[42-(cholest-5-en-3-yloxy)-2,42-dioxo-6,9,12 ,15,18,21,24,27,30,33,36,39-dodecaoxa-3-azadotetra cont-1-yl]-L-cysteine or Cys (oxa12-cholesterol)
  MOD_RES (33)..(33): C-terminal amidation
HXQGTFTSDYSKYLDERRAQDFVQWLMNTKXXX

SEQ ID NO: 1888 - protein, 32 aa, Artificial Sequence
  OXM analog
  MOD_RES (2)..(2): Xaa=D-serine
  MOD_RES (20)..(20): Xaa=Lys(gamma-glutamic acid-palmitoyl)
  MOD_RES (31)..(32): Xaa=gamma glutamic acid
  MOD_RES (32)..(32): C-terminal amidation
HXQGTFTSDYSKYLDSRRAXDFVQWLMNTKXX

SEQ ID NO: 1889 - protein, 31 aa, Artificial Sequence
  OXM analog
  MOD_RES (2)..(2): Xaa=D-serine
  MOD_RES (20)..(20): Xaa=Lys(gamma-glutamic acid-gamma-glutamic acid-palmitoyl)
  MOD_RES (31)..(31): Xaa=gamma glutamic acid
  MOD_RES (31)..(31): C-terminal amidation
HXQGTFTSDYSKYLDSRRAXDFVQWLMNTKX

SEQ ID NO: 1890 - protein, 30 aa, Artificial Sequence
  OXM analog
  MOD_RES (2)..(2): Xaa=D-serine
  MOD_RES (10)..(10): Xaa=Lys(gamma-glutamic acid-gamma-glutamic acid-palmitoyl)
  MOD_RES (30)..(30): C-terminal amidation
HXQGTFTSDXSKYLDSRRAQDFVQWLMNTK

SEQ ID NO: 1891 - protein, 30 aa, Artificial Sequence
  OXM analog
  MOD_RES (2)..(2): Xaa=D-serine
  MOD_RES (20)..(20): Xaa=Lys(gamma-glutamic acid-gamma-glutamic acid-palmitoyl)
  MOD_RES (30)..(30): C-terminal amidation
HXQGTFTSDYSKYLDERRAXDFVQWLMNTK

SEQ ID NO: 1892 - protein, 30 aa, Artificial Sequence
  OXM analog
  MOD_RES (2)..(2): Xaa=D-serine
  MOD_RES (10)..(10): Xaa=Lys(gamma-glutamic acid-gamma-glutamic acid-palmitoyl)
  MOD_RES (30)..(30): C-terminal amidation
HXQGTFTSDXSKYLDERRAQDFVQWLMNTK

SEQ ID NO: 1893 - protein, 33 aa, Artificial Sequence; identical to SEQ ID NO: 1869
  OXM analog
  MOD_RES (2)..(2): Xaa=D-serine
  MOD_RES (31)..(32): Xaa=gamma glutamic acid
  MOD_RES (33)..(33): Xaa=S-[78-(cholest-5-en-3-yloxy)-2,78-dioxo-6,9,12 ,15,18,21,24,27,30,33,36,39,42,45,48,51,54,57,60,6 3,66,69,72,75-tetracosaoxa-3-azaoctaheptacont-1-yl ]-L-cysteine or Cys (oxa24-cholesterol)

SEQ ID NO: 1894 - protein, 33 aa, Artificial Sequence
  OXM analog
  MOD_RES (2)..(2): Xaa=Aib
  MOD_RES (24)..(24): Xaa=Lys(DOTA)
  MOD_RES (27)..(27): Xaa=methionine sulfoxide
  MOD_RES (31)..(32): Xaa=gamma glutamic acid
  MOD_RES (33)..(33): Xaa=S-[42-(cholest-5-en-3-yloxy)-2,42-dioxo-6,9,12 ,15,18,21,24,27,30,33,36,39-dodecaoxa-3-azadotetra cont-1-yl]-L-cysteine or Cys (oxa12-cholesterol)
  MOD_RES (33)..(33): C-terminal amidation
HXDGTFTSDYSKYLDSRRAQDFVXWLXNTKXXX

SEQ ID NO: 1895 - protein, 31 aa, Artificial Sequence
  OXM analog
  MOD_RES (2)..(2): Xaa=D-serine
  MOD_RES (10)..(10): Xaa=Lys(gamma glutamic acid-palmitoyl)
  MOD_RES (31)..(31): Xaa=gamma glutamic acid
  MOD_RES (31)..(31): C-terminal amidation
HXQGTFTSDXSKYLDERRAQDFVQWLMNTKX

SEQ ID NO: 1896 - protein, 32 aa, Artificial Sequence
  OXM analog
  MOD_RES (2)..(2): Xaa=D-serine
  MOD_RES (10)..(10): Xaa=Lys(palmitoyl)
  MOD_RES (31)..(32): Xaa=gamma glutamic acid
  MOD_RES (32)..(32): C-terminal amidation
HXQGTFTSDXSKYLDERRAQDFVQWLMNTKXX

SEQ ID NO: 1897 - protein, 30 aa, Artificial Sequence; identical to SEQ ID NO: 1892
  OXM analog
  MOD_RES (2)..(2): Xaa=aib
  MOD_RES (10)..(10): Xaa=Lys(gamma-glutamic acid-gamma glutamic acid-palmitoyl)
  MOD_RES (30)..(30): C-terminal amidation

SEQ ID NO: 1898 - protein, 30 aa, Artificial Sequence; identical to SEQ ID NO: 1892
  OXM analog
  MOD_RES (2)..(2): Xaa=acb
  MOD_RES (10)..(10): Xaa=Lys(gamma-glutamic acid-gamma-glutamic acid-palmitoyl
  MOD_RES (30)..(30): C-terminal amidation

SEQ ID NO: 1899 - protein, 31 aa, Artificial Sequence; identical to SEQ ID NO: 1895
  OXM analog
  MOD_RES (2)..(2): Xaa=D-Serine
  MOD_RES (10)..(10): Xaa=Lys(gamma-glutamic acid-gamma-glutamic acid-palmitoyl
  MOD_RES (16)..(16): Xaa=aib
  MOD_RES (31)..(31): Xaa=gamma glutamic acid
  MOD_RES (31)..(31): C-terminal amidation

SEQ ID NO: 1900 - protein, 33 aa, Artificial Sequence; identical to SEQ ID NO: 1869
  OXM analog
  MOD_RES (2)..(2): Xaa=aib
  MOD_RES (31)..(32): Xaa=gamma glutamic acid
  MOD_RES (33)..(33): Xaa=Lys(gamma glutamic acid-palmitoyl)
  MOD_RES (33)..(33): C-terminal amidation

SEQ ID NO: 1901 - protein, 33 aa, Artificial Sequence; identical to SEQ ID NO: 1869
  OXM analog
  MOD_RES (2)..(2): Xaa=acb
  MOD_RES (31)..(32): Xaa=gamma glutamic acid
  MOD_RES (33)..(33): Xaa=Lys(gamma glutamic acid-palmitoyl)
  MOD_RES (33)..(33): C-terminal amidation

SEQ ID NO: 1902 - protein, 33 aa, Artificial Sequence; identical to SEQ ID NO: 1869
  OXM analog
  MOD_RES (2)..(2): Xaa=D-serine
  MOD_RES (31)..(32): Xaa=gamma glutamic acid
  MOD_RES (33)..(33): Xaa=S-[38-(cholest-5-en-3-yloxy)-2-oxo-6,9,12,15,1 8,21,24,27,30,33,36-undecaoxa-3-azaoctatriacont-1- yl]-L-cysteine or Cys (oxa12-O-cholesterol)

SEQ ID NO: 1903 - protein, 30 aa, Artificial Sequence
  OXM analog
  VARIANT (2)..(2): Xaa=D-serine or Aib;
  VARIANT (17)..(17): Xaa=Arg or Glu
  VARIANT (18)..(18): Xaa=Arg or Ala
  VARIANT (27)..(27): Xaa=methionine, norleucine, or O-methyl-L-homoserine
HXQGTFTSDYSKYLDSXXAQDFVQWLXNTK

SEQ ID NO: 1904 - protein, 7 aa, Artificial Sequence
  OXM peptide
RNRNNIA

SEQ ID NO: 1905 - protein, 37 aa, Artificial Sequence
  OXM analog
  VARIANT (2)..(2): Xaa=D-serine; Aib; Acb; 1-Amino-1-cyclohexane carboxylic acid (Acx); alpha-aminobutyric acid(Abu); D- alpha-aminobutyric acid (D-Abu); Aminovaleric acid Nva); beta-cyclopropyl-alanine (Cpa); propargylglycine (Prg); Allylglycine (Alg);
  VARIANT (17)..(17): Xaa=Arg or Glu
  VARIANT (18)..(18): Xaa=Arg or Ala
  VARIANT (27)..(27): Xaa=methionine (M), norleucine (Nle), methionine sulfoxide (m) or O-methyl-L-homoserine (o)
HXQGTFTSDYSKYLDSXXAQDFVQWLXNTKRNRNNIA

SEQ ID NO: 1906 - protein, 37 aa, Artificial Sequence
  OXM analog
  VARIANT (2)..(2): Xaa = D-Ser,  Aib,  Acb, Acx,  Abu, D-Abu, Aminovaleric acid (Nva), Cpa, Prg, Alg, 2-Cha, D-tbg, Vg, Acp, or Acpe
  VARIANT (12)..(12): Xaa=Ser or Lys
  VARIANT (16)..(16): Xaa=Ser or Glu
  VARIANT (17)..(17): Xaa=Arg or Glu
  VARIANT (18)..(18): Xaa=Arg or Ala
  VARIANT (20)..(20): Xaa=Gln or Lys
  VARIANT (27)..(27): Xaa=a methionine, norleucine, methionine sulfoxide, or O-methyl-L-homoserine
HXQGTFTSDYSXYLDXXXAXDFVQWLXNTKRNRNNIA

SEQ ID NO: 1907 - protein, 31 aa, Artificial Sequence
  OXM analog
  VARIANT (2)..(2): Xaa = D-Ser,  Aib,  Acb, Acx,  Abu, D-Abu, Aminovaleric acid (Nva), Cpa, Prg, Alg, 2-Cha, D-tbg, Vg, Acp, or Acpe
  VARIANT (10)..(10): Xaa=Tyr or Lys
  VARIANT (12)..(12): Xaa=Ser or Lys
  VARIANT (16)..(16): Xaa=Ser or Glu
  VARIANT (17)..(17): Xaa=Arg or Glu
  VARIANT (18)..(18): Xaa=Arg or Ala
  VARIANT (20)..(20): Xaa=Gln or Lys
  VARIANT (27)..(27): Xaa=methionine, norleucine, methionine sulfoxide, or O-methyl-L-homoserine
  VARIANT (31)..(31): Xaa=optional, but when present is one or more gamma glutamic acid residues
HXQGTFTSDXSXYLDXXXAXDFVQWLXNTKX

SEQ ID NO: 1908 - protein, 31 aa, Artificial Sequence; identical to SEQ ID NO: 1907
  OXM analog
  MOD_RES (2)..(2): Xaa = D-Ser,  Aib,  Acb, Acx,  Abu, D-Abu, Aminovaleric acid (Nva), Cpa, Prg, Alg, 2-Cha, D-tbg, Vg, Acp, or Acpe
  MOD_RES (10)..(10): Xaa=Tyr or Lys
  MOD_RES (12)..(12): Xaa=Ser or Lys
  MOD_RES (16)..(16): Xaa=Ser or Lys
  MOD_RES (17)..(17): Xaa=Arg or Glu
  MOD_RES (18)..(18): Xaa=Arg or Ala
  MOD_RES (20)..(20): Xaa=Gln or Lys
  MOD_RES (27)..(27): Xaa=methionine, norleucine, methionine sulfoxide, or O-methyl-L-homoserine
  MOD_RES (31)..(31): optional, but when present one or more gamma glutamic acid residues

SEQ ID NO: 1909 - protein, 30 aa, Artificial Sequence
  OXM analog
HSQGTFTSDSSKYLDSRRAQDFVQWLMNTK

SEQ ID NO: 1910 - protein, 32 aa, Artificial Sequence
  OXM analog
  MOD_RES (2)..(2): Xaa=D-serine, Aib, Acb, Acx, Abu, D-Abu,  Aminovaleric acid (Nva), Cpa, Prg, Alg, 2-Cha, D-tbg, Vg, Acp, or Acpe
  MOD_RES (10)..(10): Xaa=Tyr or Lys
  MOD_RES (12)..(12): Xaa=Ser or Lys
  MOD_RES (16)..(16): Xaa=Ser, aib,  or Glu
  MOD_RES (17)..(17): Xaa=Arg or Glu
  MOD_RES (18)..(18): Xaa=Arg or Ala
  MOD_RES (20)..(20): Xaa=Glu or Lys
  MOD_RES (27)..(27): Xaa=Met, norleucine, methionine sulfoxide, or O-methyl-L-homoserine
  MOD_RES (31)..(31): Xaa=gamma-glutamic acid
  MOD_RES (32)..(32): Xaa=is optional but when present, it is gamma-glutamic acid
HXQGTFTSDXSXYLDXXXAXDFVQWLXNTKXX

SEQ ID NO: 1911 - protein, 31 aa, Artificial Sequence
  OXM analog
  MOD_RES (2)..(2): Xaa=D-serine
  MOD_RES (10)..(10): Xaa=Lys(gamma-glutamic acid-gamma-glutamic acid-palmitoyl)
  MOD_RES (16)..(16): Xaa=Aib
  MOD_RES (31)..(31): Xaa=gamma-glutamic acid
  MOD_RES (31)..(31): C-terminal amidation
HXQGTFTSDXSKYLDXRRAQDFVQWLMNTEX

SEQ ID NO: 1912 - protein, 31 aa, Artificial Sequence
  OXM analog
  MOD_RES (2)..(2): Xaa=D-serine
  MOD_RES (10)..(10): Xaa=Lys(gamma-glutamic acid-gamma-glutamic acid-palmitoyl)
  MOD_RES (16)..(16): Xaa=aib
  MOD_RES (30)..(30): Xaa=D-Lys
  MOD_RES (31)..(31): Xaa=gamma-glutamic acid
  MOD_RES (31)..(31): C-terminal amidation
HXQGTFTSDXSKYLDXRRAQDFVQWLMNTXX

SEQ ID NO: 1913 - protein, 31 aa, Artificial Sequence; identical to SEQ ID NO: 1895
  OXM analog
  MOD_RES (2)..(2): Xaa=D-serine
  MOD_RES (10)..(10): Xaa=Lys(gamma-glutamic acid-gamma-glutamic acid-palmitoyl)
  MOD_RES (31)..(31): Xaa=gamma-glutamic acid
  MOD_RES (31)..(31): C-terminal amidation

SEQ ID NO: 1914 - protein, 31 aa, Artificial Sequence; identical to SEQ ID NO: 1911
  OXM analog
  MOD_RES (2)..(2): Xaa=D-serine
  MOD_RES (10)..(10): Xaa=Lys(gamma-glutamic acid-gamma-glutamic acid-palmitoyl)
  MOD_RES (16)..(16): Xaa=aib
  MOD_RES (31)..(31): Xaa=gamma-D-glutamic acid

SEQ ID NO: 1915 - protein, 31 aa, Artificial Sequence; identical to SEQ ID NO: 1895
  OXM analog
  MOD_RES (2)..(2): Xaa=D-serine
  MOD_RES (10)..(10): Xaa=Lys(glutamic acid-glutamic acid-palmitoyl)
  MOD_RES (31)..(31): Xaa=gamma-glutamic acid
  MOD_RES (31)..(31): C-terminal amidation

SEQ ID NO: 1916 - protein, 31 aa, Artificial Sequence; identical to SEQ ID NO: 1895
  OXM analog
  MOD_RES (2)..(2): Xaa=D-serine
  MOD_RES (10)..(10): Xaa=Lys(Arg-Arg-palmitoyl)
  MOD_RES (31)..(31): Xaa=gamma-glutamic acid
  MOD_RES (31)..(31): C-terminal amidation

SEQ ID NO: 1917 - protein, 31 aa, Artificial Sequence; identical to SEQ ID NO: 1895
  OXM analog
  MOD_RES (2)..(2): Xaa=D-Serine
  MOD_RES (10)..(10): Xaa=Lys(homocysteic acid-homocysteic acid-palmitoyl)
  MOD_RES (31)..(31): Xaa=gamma-glutamic acid
  MOD_RES (31)..(31): C-terminal amidation

SEQ ID NO: 1918 - protein, 31 aa, Artificial Sequence; identical to SEQ ID NO: 1895
  OXM analog
  MOD_RES (2)..(2): Xaa=D-Serine
  MOD_RES (10)..(10): Xaa=Lys(D-glutamic acid-D-glutamic acid-palmitoyl)
  MOD_RES (31)..(31): Xaa=gamma-glutamic acid
  MOD_RES (31)..(31): C-terminal amidation

SEQ ID NO: 1919 - protein, 31 aa, Artificial Sequence
  OXM analog
  MOD_RES (2)..(2): Xaa=D-Serine
  MOD_RES (10)..(10): Xaa=Lys(gamma-glutamic acid-gamma-glutamic acid-myristoyl)
  MOD_RES (16)..(16): Xaa=aib
  MOD_RES (31)..(31): Xaa=gamma-glutamic acid
  MOD_RES (31)..(31): C-terminal amidation
HXQGTFTSDXSKYLDXRRAQDFVQWLMNTKX

SEQ ID NO: 1920 - protein, 31 aa, Artificial Sequence
  OXM analog
  MOD_RES (2)..(2): Xaa=D-Serine
  MOD_RES (10)..(10): Xaa=Lys(gamma-glutamic acid-gamma-glutamic acid-palmitoyl)
  MOD_RES (16)..(16): Xaa=aib
  MOD_RES (31)..(31): Xaa=gamma-glutamic acid
  MOD_RES (31)..(31): C-terminal amidation
HXQGTFTSDXSKYLDXRAAQDFVQWLMDTKX

SEQ ID NO: 1921 - protein, 31 aa, Artificial Sequence; identical to SEQ ID NO: 1919
  OXM analog
  MOD_RES (2)..(2): Xaa=D-Serine
  MOD_RES (10)..(10): Xaa=Lys(gamma-glutamic acid-gamma-glutamic acid-stearoyl)
  MOD_RES (16)..(16): Xaa=aib
  MOD_RES (31)..(31): Xaa=gamma-glutamic acid
  MOD_RES (31)..(31): C-terminal amidation

1. An insulin agonist/incretin conjugate comprising
a glucagon related peptide; and
an insulin peptide, wherein the C-terminal region of the glucagon related peptide is linked either directly or through a linker to the insulin peptide at a position independently selected from
i) the side chain of an amino acid at a position selected from A9, A14 or A15 of the A chain, or positions B1, B2, B10, B22, B28 or B29 of the B chain; or
ii) the N-terminal alpha amine of the B chain; or
iii) the carboxy terminus of the B chain; or
iv) at the side chain of an amino acid at any position of a linking moiety that links the A chain and B chain of a single chain insulin analog.

2.-6. (canceled)

7. The conjugate of claim 1 wherein the glucagon related peptide comprises
(i) the amino acid sequence:
X1-X2-Gln-Gly-Thr-Phe-Thr-Ser-Asp-Tyr-Ser-Lys-Tyr-Leu-Asp-Ser-Arg-Arg-Ala-Gln-Asp-Phe-Val-Gln-Trp-Leu-Met-Z (SEQ ID NO: 839) with 1 to 3 amino acid modifications thereto, wherein
X1 and/or X2 is a non-native (relative to SEQ ID NO: 701) amino acid that reduces susceptibility of the glucagon related peptide to cleavage by dipeptidyl peptidase IV (DPP-IV),
Z is selected from the group consisting of Asn-Thr-COOH, and Y—COOH, wherein Y is 1 to 2 amino acids, and further wherein
(1) a lactam bridge connects the side chains of an amino acid at position i and an amino acid at position i+4, wherein i is 12, 16, 20 or 24 or
(2) one, two, three, or all of the amino acids at positions 16, 20, 21, and 24 of the glucagon related peptide is substituted with an α,α-disubstituted amino acid;
and said glucagon related peptide has glucagon agonist activity;
(ii) the amino acid sequence of SEQ ID NO: 701 modified to comprise at least one amino acid modification selected from the group consisting of:
substitution of Asn at position 28 with a charged amino acid;
substitution of Asn at position 28 with a charged amino acid selected from the group consisting of Asp, Glu, cysteic acid, and homocysteic acid;
substitution at position 28 with Asn, Asp, or Glu;
substitution at position 28 with Glu;
substitution of Thr at position 29 with a charged amino acid;
substitution of Thr at position 29 with a charged amino acid selected from the group consisting of Lys, Arg, His, Asp, Glu, cysteic acid, and homocysteic acid;
substitution at position 29 with Asp, Glu, or Lys;
substitution at position 29 with Glu;
insertion of 1-3 charged amino acids after position 29;
insertion after position 29 of Glu or Lys;
insertion after position 29 of Gly-Lys or Lys-Lys; or a combination thereof;
and at least one amino acid modification selected from Group A or Group B, or a combination thereof;
wherein Group A is an amino acid modification selected from the group consisting of substitution of Ser at position 16 with Thr or AIB; and
wherein Group B is an amino acid modification selected from the group consisting of:
substitution of His at position 1 with a non-native amino acid that reduces susceptibility of the glucagon related peptide to cleavage by dipeptidyl peptidase IV (DPP-IV),
substitution of Ser at position 2 with a non-native amino acid that reduces susceptibility of the glucagon related peptide to cleavage by dipeptidyl peptidase IV (DPP-IV),
substitution of Tyr at position 10 with Phe or Val;
substitution of Lys at position 12 with Arg;
substitution of Gln at position 20 with Ala or AIB;
substitution of Asp at position 21 with Glu;
substitution of Gln at position 24 with Ala or AIB;
substitution of Met at position 27 with Leu or Nle;
or a combination thereof;
and wherein said glucagon related peptide has glucagon agonist activity;
(iii) a glucagon related peptide of SEQ ID NO: 701, modified to comprise
(a) an amino acid modification at position 1 that confers GIP agonist activity,
(b) (1) a lactam bridge between the side chains of amino acids at positions i and i+4 or between the side chains of amino acids at positions j and j+3, wherein i is 12, 13, 16, 17, 20 or 24, and wherein j is 17, or
(2) one, two, three, or all of the amino acids at positions 16, 20, 21, and 24 of the analog is substituted with an α,α-disubstituted amino acid,
(c) amino acid modifications at one, two or all of positions 27, 28 and 29, and
(d) 1-6 further amino acid modifications,
wherein the EC50 of the analog for GIP receptor activation is about 10 nM or less;
(iv) the sequence of SEQ ID NO: 72 or an analog of SEQ ID NO: 72, wherein said analog differs from SEQ ID NO: 72 by 1 to 3 amino acid modifications, selected from positions 1, 2, 3, 5, 7, 10, 11, 13, 14, 17, 18, 19, 21, 24, 27, 28, and 29, wherein said glucagon related peptide exhibits at least 20% of the activity of native GLP-1 at the GLP-1 receptor; optionally, wherein the glucagon related peptide comprises an intramolecular bridge between the side chains of the amino acids at positions 12 and 16, 16 and 20, 20 and 24, or 24 and 28 or a pharmaceutically acceptable salt thereof; optionally a salt bridge or a lactam bridge between amino acids at positions 16 and 20;
(v) an amino acid that differs from SEQ ID NO: 701 by no more than ten amino acid modifications, comprising one or more amino acid substitutions with AIB at positions 16, 20, 21, and/or 24, and an amino acid modification at position 1 and/or 2 that provides reduced susceptibility to cleavage by dipeptidyl peptidase IV, wherein said glucagon related peptide exhibits at least 20% of the activity of native GLP-1 at the GLP-1 receptor.

8.-9. (canceled)

10. The conjugate of claim 7 wherein said insulin peptide comprises an A chain and a B chain wherein
I) said A chain comprises a sequence GIVX₄X₅CCX₈X₉X₁₀CX₁₂LX₁₄X₁₅LX₁₇X₁₈YCX₂₁-R₁₃ (SEQ ID NO: 19), and said B chain comprises a sequence R₂₂-X₂₅LCGX₂₀X₃₀LVX₃₃X₃₄LYLVCGX₄₁X₄₂GFX₄₅ (SEQ ID NO: 20), wherein
X₄ is glutamic acid or aspartic acid;
X₅ is glutamine or glutamic acid
X₈ is histidine, threonine or phenylalanine;
X₉ is serine, arginine, lysine, ornithine or alanine;
X₁₀ is isoleucine or serine;
X₁₂ is serine or aspartic acid;
X₁₄ is tyrosine, arginine, lysine, ornithine or alanine;
X₁₅ is glutamine, glutamic acid, arginine, alanine, lysine, ornithine or leucine;
X₁₇ is glutamic acid, aspartic acid, asparagine, lysine, ornithine or glutamine;
X₁₈ is methionine, asparagine, glutamine, aspartic acid, glutamic acid or threonine;
X₂₁ is selected from the group consisting of alanine, glycine, serine, valine, threonine, isoleucine, leucine, glutamine, glutamic acid, asparagine, aspartic acid, histidine, tryptophan, tyrosine, and methionine;
X₂₅ is histidine or threonine;
X₂₉ is selected from the group consisting of alanine, glycine and serine;
X₃₀ is selected from the group consisting of histidine, aspartic acid, glutamic acid, homocysteic acid and cysteic acid;
X₃₃ is selected from the group consisting of aspartic acid and glutamic acid;
X₃₄ is selected from the group consisting of alanine and threonine;
X₄₁ is selected from the group consisting of glutamic acid, aspartic acid or asparagine;
X₄₂ is selected from the group consisting of alanine, ornithine, lysine and arginine;
X₄₅ is tyrosine or phenylalanine;
R₂₂ is selected from the group consisting of AYRPSE (SEQ ID NO: 14), FVNQ (SEQ ID NO: 12), PGPE (SEQ ID NO: 11), a tripeptide glycine-proline-glutamic acid, a tripeptide valine-asparagine-glutamine, a dipeptide proline-glutamic acid, a dipeptide asparagine-glutamine, glutamine, glutamic acid and an N-terminal amine; and
R₁₃ is COOH or CONH₂;
II) said A chain comprises the sequence GIVEQCCX₈X₉ICSLYQLENYCX₂₁-R₁₃ (SEQ ID NO: 73) said B chain comprises the sequence R₂₂-X₂₅LCGX₂₉X₃₀LVX₃₃X₃₄LYLVCGX₄₁X₄₂GFX₄₅ (SEQ ID NO: 20)
X₈ is histidine or threonine;
X₉ is serine, lysine, or alanine;
X₂₁ is alanine, glycine or asparagine;
X₂₅ is histidine or threonine;
X₂₉ is selected from the group consisting of alanine, glycine and serine;
X₃₀ is selected from the group consisting of histidine, aspartic acid, glutamic acid, homocysteic acid and cysteic acid;
X₃₃ is selected from the group consisting of aspartic acid and glutamic acid;
X₃₄ is selected from the group consisting of alanine and threonine;
X₄₁ is selected from the group consisting of glutamic acid, aspartic acid or asparagine;
X₄₂ is selected from the group consisting of alanine, ornithine, lysine and arginine;
X₄₅ is tyrosine or phenylalanine;
R₂₂ is selected from the group consisting of FVNQ (SEQ ID NO: 12), a tripeptide valine-asparagine-glutamine, a dipeptide asparagine-glutamine, glutamine and an N-terminal amine; and
R₁₃ is COOH or CONH₂;
III) said A chain comprises a sequence GIVDECCX₈X₉SCDLRRLEMX₁₉CX₂₁-R₁₃ (SEQ ID NO: 74) and said B chain comprises a sequence R₂₂-X₂₅LCGAX₃₀LVDALYLVCGDX₄₂GFY (SEQ ID NO: 75), wherein
X₈ is phenylalanine or histidine;
X₉ is arginine, ornithine or alanine;
X₁₉ is tyrosine, 4-methoxy-phenylalanine or 4-amino-phenylalanine;
X₂₁ is alanine or asparagine;
X₂₅ is histidine or threonine;
X₃₀ is selected from the group consisting of histidine, aspartic acid, glutamic acid, homocysteic acid and cysteic acid;
X₄₂ is selected from the group consisting of alanine ornithine and arginine; and R₁₃ is COOH or CONH₂;
R₂₂ is selected from the group consisting of AYRPSE (SEQ ID NO: 14), FVNQ (SEQ ID NO: 12), PGPE (SEQ ID NO: 11), a tripeptide glycine-proline-glutamic acid, a tripeptide valine-asparagine-glutamine, a dipeptide proline-glutamic acid, a dipeptide asparagine-glutamine, glutamine, glutamic acid and an N-terminal amine; and
R₁₃ is COOH or CONH₂;
IV) said A chain comprises a sequence GIVEQCCTSICSLYQLENYCN-R₁₃ (SEQ ID NO: 1) and said B chain comprises a sequence FVNQHLCGSHLVEALYLVCGERGFFYTPKT (SEQ ID NO: 2).

11. The conjugate of claim 7 wherein said B chain comprises a sequence R₂₂-X₂₅LCGX₂₉X₃₀LVX₃₃X₃₄LYLVCGX₄₁X₄₂GFX₄₅YT-Z₁-B₁ (SEQ ID NO: 142), wherein
Z₁ is a dipeptide selected from the group consisting of aspartate-lysine, lysine-proline, and proline-lysine; and
B₁ is selected from the group consisting of threonine, alanine or a threonine-arginine-arginine tripeptide.

12. (canceled)

13. The conjugate of claim 8 wherein the insulin peptide is a single chain insulin and the peptide linker joining the B and A chains is selected from the group consisting of SSSSKAPPPSLPSPSRLPGPSDTPILPQR (SEQ ID NO: 52), SSSSRAPPPSLPSPSRLPGPSDTPILPQK (SEQ ID NO: 51), GAGSSSX₅₇X₅₈ (SEQ ID NO: 76), GYGSSSX₅₇X₅₈ (SEQ ID NO: 21) and GYGSSSX₅₇X₅₈APQT; (SEQ ID NO: 77), wherein
X₅₇ and X₅₈ are independently arginine, lysine or ornithine.

14. The conjugate of claim 13 wherein the peptide linker is selected from the group consisting of GYGSSSRR (SEQ ID NO: 18) and GAGSSSRR (SEQ ID NO: 22).

15.-21. (canceled)

22. The conjugate of claim 1 wherein the glucagon related peptide comprises an amino acid sequence selected from the group consisting of:
i. SEQ ID NO: 81;
j. SEQ ID NO: 83;
k. SEQ ID NO: 89;
l. any one of SEQ ID NOs: 84-88;
m. any one of SEQ ID Nos: 100-103;
n. SEQ ID NO: 108, wherein the amino acid at position 20 is selected from the group consisting of arginine, ornithine, and citrulline;
o. any one of SEQ ID Nos: 98, 99, 109-112, 104-106, and SEQ ID NO: 72, wherein the Xaa at position 28 of the peptide is asparagine or aspartic acid; the Xaa at position 29 of the peptide is threonine or glycine; and C-terminus of the peptide further comprises SEQ ID NO: 78, SEQ ID NO: 79, COOH or CONH₂; and
p. any one of SEQ ID Nos: 251, 319 and 510.

23. The conjugate of claim 1 wherein the glucagon related peptide comprises an analog of glucagon (SEQ ID NO: 701) having GIP agonist activity, said analog comprising one or more of the following modifications:
(a) an amino acid modification at position 1 that confers GIP agonist activity, optionally, wherein the amino acid at position 1 is an amino acid lacking an imidazole side chain;
(b) an amino acid substitution of Ser at position 16 with an amino acid of Formula IV: [chemical structure]
wherein n is 1 to 7, wherein each of R1 and R2 is independently selected from the group consisting of H, C₁-C₁₈ alkyl, (C₁-C₁₈ alkyl)OH, (C₁-C₁₈ alkyl)NH₂, (C₁-C₁₈ alkyl)SH, (C₀-C₄ alkyl)(C₃-C₆)cycloalkyl, (C₀-C₄ alkyl)(C₂-C₅ heterocyclic), (C₀-C₄ alkyl)(C₆-C₁₀ aryl)R₇, and (C₁-C₄ alkyl)(C₃-C₉ heteroaryl), wherein R₇ is H or OH, and the side chain of the amino acid of Formula IV comprises a free amino group, the amino acid of Formula IV optionally being homoLys, Lys, Orn, or 2,4-diaminobutyric acid (Dab),
(c) one, two, three, or all of the amino acids at positions 16, 20, 21, and 24 of the analog is substituted with an α,α-disubstituted amino acid,
(d) amino acid modifications at one, two or all of positions 27, 28 and 29, and
(e) 1-9 further amino acid modifications relative to the glucagon sequence (SEQ ID NO: 701),
wherein the EC50 of the analog for GIP receptor activation is about 10 nM or less.

24. The conjugate of claim 23, wherein the glucagon related peptide comprises the following modifications: (a) the amino acid at position 1 is a large, aromatic amino acid, optionally, Tyr, and (b) wherein (i) the Met at position 27 is substituted with a large, aliphatic amino acid, optionally Leu, (ii) the Asn at position 28 is substituted with a small aliphatic amino acid, optionally Ala, or (iii) the Thr at position 29 is substituted with a small aliphatic amino acid, optionally Gly, or wherein the analog comprises a combination of (i), (ii), and (iii); and (c) the glucagon related peptide further comprises the amino acid sequence of GPSSGAPPPS (SEQ ID NO: 95) or XGPSSGAPPPS (SEQ ID NO: 96) linked to said peptide at a position located C-terminal to the amino acid at position 29.

25. (canceled)

26. The conjugate of claim 24, wherein the glucagon related peptide further comprises one or more of the following modifications:
(a) Ser at position 2 substituted with D-Ser, Ala, D-Ala, Gly, N-methyl-Ser, AIB, Val, or α-amino-N-butyric acid;
(b) Gln at position 3 substituted with Glu;
(c) substitution of the amino acid Tyr at position 10 with an amino acid, optionally an amino acid of Formula I: [chemical structure]
wherein n=1 to 4,
comprising a side chain covalently linked to an acyl group or alkyl group;
(d) addition of an amino acid, optionally an amino acid of Formula I, comprising a side chain covalently linked to an acyl group or alkyl group as the C-terminal amino acid of the analog;
(e) Lys at position 12 substituted with Ile;
(f) Arg at position 17 substituted with Gln;
(g) Arg at position 18 substituted with Ala;
(h) Asp at position 21 substituted with Glu;
(i) Gln at position 24 substituted with Asn; and
(j) replacement of the carboxylic acid of the C-terminal amino acid with a charge-neutral group, optionally, an amide.

27.-30. (canceled)

31. The conjugate of claim 1 wherein the glucagon related peptide comprises the sequence of HAEGTFTSDVSSYLEEQAAREFIAWLVRGRG (SEQ ID NO: 700), HAEGTFTSDVSSYLEGQAAKEFIAWLVKGRG (SEQ ID NO: 703), HAEGTFTSDVSSYLEGQAAKEFICWLVKGR (SEQ ID NO: 717) HSQGTFTSDYSKYLDSRRAQDFVQWLMNT (SEQID NO: 701) or HSQGTFTSDYSKYLDERRAQDFVQWLMNT (SEQ ID NO: 699).

32. The conjugate of claim 31 wherein the insulin peptide is a single chain insulin analog comprising the sequence GPEX₂₅LCGAX₃₀LVDALYLVCGDX₄₂GFYFNX₄₈X₄₉GAGSSSRRGIVDECCX₈RSCDLRRLENYCN-R₁₃ (SEQ ID NO: 144), FVNQHLCGSHLVEALYLVCGERGFFYTPKTGAGSSSRRGIVEQCCTSICSLYQLENYCN-R₁₃ (SEQ ID NO: 143) or GPEHLCGAHLVDALYLVCGDRGFYFNDRGAGSSSRRGIVDECCHRSCDLRRLENYCN (SEQ ID NO: 145) wherein
X₈ is phenylalanine or histidine;
X₂₅ is histidine or threonine;
X₃₀ is histidine, aspartic acid, glutamic acid, homocysteic acid or cysteic acid;
X₄₂ is alanine ornithine or arginine;
X₄₈ is lysine or aspartic acid;
X₄₉ is proline, ornithine or arginine; and
R₁₃ is COOH or CONH₂.

33. A derivative of the conjugate of claim 1 further comprising the structure U-J, wherein
U is an amino acid or a hydroxy acid;
J is an N-alkylated amino acid linked to said conjugate through an amide bond between a carboxyl moiety of J and an amine of the conjugate, further wherein the chemical cleavage half-life (t_{1/2}) of U-J from the conjugate is at least about 1 hour to about 1 week in PBS under physiological conditions.

34.-35. (canceled)

36. The conjugate of claim 1 wherein a hydrophilic moiety is covalently linked to the side chain of an amino acid of said conjugate at one or more positions corresponding to A14, A15, B0, B1, B10, B22, B28, B29 or positions 16, 17, 20, 21, 24, or 29 of native glucagon (SEQ ID NO: 701), or at the C-terminal region of the glucagon related peptide.

37.-38. (canceled)

39. The conjugate of claim 1, further comprising an acyl group or alkyl group covalently linked to an amino acid side chain.

40. The conjugate of claim 39 wherein said acyl group or alkyl group is covalently linked to a position of the glucagon related peptide that corresponds to position 10 of native glucagon (SEQ ID NO: 701), or at one or more positions selected from A14, A15, B0, B1, B10, B22, B28, B29 of the insulin peptide.

41. A pharmaceutical composition comprising a conjugate of claim 1, or pharmaceutically acceptable salt thereof, and a pharmaceutically acceptable carrier.

42. (canceled)

43. A method for treating diabetes, said method comprising the step of administering the composition of claim 41, or pharmaceutically acceptable salt thereof, to a patient in need thereof.
